(19) United States
(12) Patent Application Publication
(10) Pub. No.: US 2026/0007772 A1
(43) Pub. Date: Jan. 8, 2026

(54) COMPOSITIONS AND METHODS FOR TREATING ALPHA-1 ANTITRYPSIN DEFICIENCY

(71) Applicant: Intellia Therapeutics, Inc., Cambridge, MA (US)

(72) Inventors: Laura Sepp-Lorenzino, Jenkintown, PA (US); Zachary W. Dymek, Grafton, MA (US)

(21) Appl. No.: 18/700,487

(22) PCT Filed: Oct. 14, 2022
(86) PCT No.: PCT/US2022/078140

§ 371 Date: Apr. 11, 2024

Related U.S. Application Data
(60) Provisional application No. 63/256,365, filed on Oct. 15, 2021.

(51) Int. Cl. A61K 48/00; A61K 9/127; A61K 9/51; A61P 3/00; C07K 14/81; C12N 9/22; C12N 15/11; C12N 15/86; C12N 15/88

(52) U.S. Cl. CPC A61K 48/005; A61K 9/127; A61K 9/5123; A61P 3/00; C07K 14/8125; C12N 9/226; C12N 15/111; C12N 15/86; C12N 15/88; C12N 2310/20; C12N 2750/14143; C12N 2830/50

(57) ABSTRACT

Compositions and methods for expressing alpha 1 antitrypsin (AAT) in a host cell are provided. Also provided are compositions and methods for treating subjects having alpha 1 antitrypsin deficiency (AATD).

### CROSS-REFERENCE TO RELATED APPLICATIONS

[0001] This application claims the benefit of U.S. Provisional Application No. 63/256,365, filed on Oct. 15, 2021, the disclosure of which is hereby incorporated by reference in its entirety.

### BACKGROUND

[0002] Alpha-1 antitrypsin (AAT or A1AT) or serum trypsin inhibitor is a type of serine protease inhibitor (also termed a serpin) encoded by the SERPINA1 gene. AAT is primarily synthesized and secreted by hepatocytes, and functions to inhibit the activity of neutrophil elastase in the lung. Without sufficient quantities of functioning AAT, neutrophil elastase is uncontrolled and damages alveoli in the lung. Thus, mutations in SERPINA1 that result in decreased levels of AAT, or decreased levels of properly functioning AAT, lead to lung pathology. Moreover, mutations in SERPINA1 that lead to production of misformed AAT can lead to liver pathology due to accumulation of AAT in hepatocytes. Thus, insufficient and improperly formed AAT caused by SERPINA1 mutation can lead to lung and liver pathology.

[0003] More than one hundred allelic variants have been described for the SERPINA1 gene. Variants are generally classified according to their effect on serum levels of AAT. For example, M alleles are normal variants associated with normal serum AAT levels, whereas Z and S alleles are mutant variants associated with decreased AAT levels. The presence of Z and S alleles is associated with al-antitrypsin deficiency (AATD or A1AD), a genetic disorder characterized by mutations in the SERPINA1 gene that leads to the production of abnormal AAT.

[0004] There are many forms and degrees of AATD. The “Z-variant” is the most common, causing severe clinical disease in both liver and lung. The Z-variant is characterized by a single nucleotide change in the 5′ end of the 5^{th} exon that results in a missense mutation of glutamic acid to lysine at amino acid position 342 (E342K). Symptoms arise in patients that are both homozygous (ZZ) and heterozygous (MZ or SZ) at the Z allele. The presence of one or two Z alleles results in SERPINA1 mRNA instability, and AAT protein polymerization and aggregation in liver hepatocytes. Patients having at least one Z allele have an increased incidence of liver cancer due to the accumulation of aggregated AAT protein in the liver. In addition to liver pathology, AATD characterized by at least one Z allele is also characterized by lung disease due to the decrease in AAT in the alveoli and the resulting decrease in inhibition of neutrophil elastase. The prevalence of the severe ZZ-form (i.e., homozygous expression of the Z-variant) is 1:2,000 in northern European populations, and 1:4,500 in the United States. The other common mutation is the S-variant, which results in a protein that is degraded intracellularly before secretion. Compared to the Z-variant, the S-variant causes milder reduction in serum AAT and lower risk for lung disease.

[0005] A need exists for methods and compositions that ameliorate the negative effects of AATD in both the liver and lung.

### SUMMARY

[0006] The present disclosure provides compositions and methods for expressing heterologous AAT at a human genomic locus, such as an albumin safe harbor site, thereby allowing secretion of heterologous AAT and alleviating the negative effects of AATD in the lung. The present disclosure also provides compositions and methods to knock out or reduce expression of the endogenous SERPINA1 gene thereby, thereby eliminating or reducing the production of mutant forms of AAT that are associated with liver symptoms in patients with AATD. Thus, in certain embodiments are compositions and methods for inserting heterologous AAT at a safe harbor site to restore AAT function in a cell or an organism and blocking expression of an endogenous SERPINA1 allele (e.g., by targeting it with a guide RNA or siRNA).

[0007] In certain aspects, provided herein are bidirectional nucleic acid constructs. In some embodiments, such constructs comprise: a) a first segment comprising a first alpha-1 antitrypsin (AAT) polypeptide coding sequence, wherein the codon usage of the first AAT polypeptide coding sequence is different from the codon usage of the SERPINA1 gene; and b) a second segment comprising a reverse complement of a second AAT polypeptide coding sequence wherein the codon usage of the second AAT polypeptide coding sequence is different from the codon usage of the first AAT polypeptide coding sequence and from the codon usage of the SERPINA1 gene. In some embodiments, the coding sequences of the first segment and the second segment are CpG depleted. In some embodiments, the bidirectional nucleic acid construct nucleotide sequence is CpG depleted. In certain embodiments, the construct does not comprise a promoter that drives the expression of either the first AAT polypeptide coding sequence or the second AAT polypeptide coding sequence. In some embodiments, the second segment is 3′ of the first segment. In certain embodiments, the construct does not comprise a homology arm.

[0008] As used herein, an AAT polypeptide coding sequence is a nucleotide sequence that encodes an active polypeptide that inhibits neutrophil elastase. For example, in some embodiments the AAT polypeptide coding sequence encodes a polypeptide comprising the sequence SEQ ID NO: 700 or 702.

[0009] In certain embodiments, wherein the first segment of the bidirectional nucleic acid construct is linked to the second segment of the bidirectional nucleic acid construct by a linker. In some embodiments, the linker is 5, 10, 20, 30, 40, 50, 60, 70, 80, 90, 100, 150, 200, 250, 300, 500, 1000, 1500, 2000 nucleotides in length. In certain embodiments, the linker is CpG depleted.

[0010] In some embodiments, each of the first segment and second segment of the bidirectional nucleic acid construct comprises a polyadenylation tail sequence, a polyadenylation signal sequence, or a polyadenylation site. In some embodiments, the construct comprises a splice acceptor site. In certain embodiments, the construct comprises a first splice acceptor site upstream of the first segment and a second (reverse) splice acceptor site downstream of the second segment. In certain embodiments, the splice acceptor site is a human splice acceptor site. In certain embodiments, the splice acceptor site is a murine splice acceptor site.

[0011] In certain embodiments, the bidirectional nucleic acid construct is double-stranded, optionally double-stranded DNA. In some embodiments, the construct is single-stranded, optionally single-stranded DNA.

[0012] In certain embodiments, the first AAT polypeptide coding sequence of the bidirectional nucleic acid construct or the second AAT polypeptide coding sequence of the bidirectional nucleic acid construct is codon-optimized. In certain embodiments, the construct comprises one or more of the following terminal structures: hairpin, loops, inverted terminal repeats (ITR), or toroid. In some embodiments, the terminal structure is CpG depleted. In some embodiments, the bidirectional nucleic acid construct nucleotide sequence is CpG depleted but the ITR is not CPG depleted.

[0013] In certain embodiments, the bidirectional nucleic acid construct comprises one, two, or three inverted terminal repeats (ITR). In some embodiments, the construct comprises no more than two ITRs.

[0014] In some embodiments, the AAT polypeptide coding sequences of the bidirectional nucleic acid construct have codon usage that prevents or reduces the ability of a SERPINA1 targeting siRNA, dsRNA or guide RNA to target it.

[0015] In certain embodiments, both the first AAT polypeptide coding sequence of the bidirectional nucleic acid construct and the second AAT polypeptide coding sequence of the bidirectional nucleic acid construct includes the use of a non-wild type codon within the a region (or one or more regions) of the sequence corresponding to bases 409-431, 409-410, 412-431, 415-418, 506-528, 506-525, 519-522, 527-528, 538-560, 538-557, 551-554, 559-560, 957-977, 970-976, 1403-1436, 1403-1425, 1410-1436, 1418-1424, 1423-1435, or any combination thereof of SEQ ID NO:703.

[0016] In some embodiments, both the first AAT polypeptide coding sequence of the bidirectional nucleic acid construct and the second AAT polypeptide coding sequence of the bidirectional nucleic acid construct includes at least one, at least 2, or at least 3 mismatches (e.g., from 1-10 mismatches, from 1-9 mismatches, from 1-8 mismatches, from 1-7 mismatches, from 1-6 mismatches, from 1-5 mismatches, from 1-4 mismatches, from 1-3 mismatches, from 1-2 mismatches, 1 mismatch, from 2-10 mismatches, from 2-9 mismatches, from 2-8 mismatches, from 2-7 mismatches, from 2-6 mismatches, from 2-5 mismatches, from 2-4 mismatches, from 1-3 mismatches, 2 mismatches, from 3-10 mismatches, from 3-9 mismatches, from 3-8 mismatches, from 3-7 mismatches, from 3-6 mismatches, from 3-5 mismatches, from 3-4 mismatches, 3 mismatches, from 4-10 mismatches, from 4-9 mismatches, from 4-8 mismatches, from 4-7 mismatches, from 4-6 mismatches, from 4-5 mismatches, 4 mismatches, from 5-10 mismatches, from 5-9 mismatches, from 5-8 mismatches, from 5-7 mismatches, from 5-6 mismatches, 5 mismatches, from 6-10 mismatches, from 6-9 mismatches, from 6-8 mismatches, from 6-7 mismatches, 6 mismatches, from 7-10 mismatches, from 7-9 mismatches, from 7-8 mismatches, 7 mismatches, from 8-10 mismatches, from 8-9 mismatches, or 8 mismatches) from a wild-type SERPINA1 gene sequence within the region (or one or more regions) of the AAT polypeptide coding sequence corresponding to bases 409-431, 409-410, 412-431, 415-418, 506-528, 506-525, 519-522, 527-528, 538-560, 538-557, 551-554, 559-560, 957-977, 970-976, 1403-1436, 1403-1425, 1410-1436, 1418-1424, 1423-1435, or any combination thereof of SEQ ID NO: 703.

[0017] In some embodiments, neither the first AAT polypeptide coding sequence of the bidirectional nucleic acid construct nor the second AAT polypeptide coding sequence of the bidirectional nucleic acid construct is targeted by an RNAi agent targeted to nucleotides 957-977, 1403-1425, or 1410-1436 of SEQ ID NO: 703.

[0018] In certain embodiments, neither the first AAT polypeptide coding sequence of the bidirectional nucleic acid construct nor the second AAT polypeptide coding sequence of the bidirectional nucleic acid construct is targeted by a SERPINA1 targeting guide RNA having a targeting sequence of SEQ ID NOs: 1129, 1130, or 1131.

[0019] In some embodiments, both the first AAT polypeptide coding sequence of the bidirectional nucleic acid construct and the second AAT polypeptide coding sequence of the bidirectional nucleic acid construct includes the use of a non-wild type codon within the region (or one or more regions) of the sequence corresponding to bases 409-431, 409-410, 412-431, 415-418, 506-528, 506-525, 519-522, 527-528, 538-560, 538-557, 551-554, 559-560, 957-977, 970-976, 1403-1436, 1403-1425, 1410-1436, 1418-1424, 1423-1435, or any combination thereof of SEQ ID NO: 703.

[0020] In certain embodiments, the first AAT polypeptide coding sequence of the bidirectional nucleic acid construct comprises a sequence selected from SEQ ID NOs: 771, 772, 781, 782. In some embodiments, the second AAT polypeptide coding sequence of the bidirectional nucleic acid construct comprises a sequence selected from SEQ ID NOs: 771, 772, 781, and 782. In certain embodiments, the nucleic acid sequence of the bidirectional nucleic acid construct is selected from: SEQ ID NOs: 770, 780, and 1564.

[0021] In certain aspects, provided herein is a method of introducing a SERPINA1 nucleic acid sequence into a cell or population of cells comprising administering to the cell or population of cells comprising administering to the cell or population of cells a bidirectional nucleic acid construct provided herein. In some embodiments, the method comprises administering to a cell or population of cells: i) a bidirectional nucleic acid construct provided herein, ii) an RNA-guided DNA binding agent; and iii) an albumin guide RNA (gRNA); thereby introducing the SERPINA1 nucleic acid to the cell or population of cells. In some embodiments, the albumin gRNA comprises a sequence chosen from: a) a sequence that is at least 95%, SEQ ID Nos: 2-33; b) at least 17, 18, 19, or 20 contiguous nucleotides of a sequence selected from the group consisting of SEQ ID NOs: 2-33; c) a sequence selected from the group consisting of SEQ ID NOs: 2-33. In some embodiments, the cell or population of cells includes a liver cell (e.g., a hepatocyte). In some embodiments, the cell or population of cells expresses functional AAT at a level that is increased by at least about 10%, 20%, 30%, 40%, 50%, 60%, 70%, 80%, 90%, 100%, or more, as compared to a level before administration.

[0022] In certain aspects, provided herein is a method of increasing alpha-1 antitrypsin (AAT) secretion from a liver cell or population of cells comprising administering to the cell or population of cells comprising administering to the liver cell or population of liver cells a bidirectional nucleic acid construct provided herein. In some embodiments, the method comprises administering to a liver cell or population of cells: i) a bidirectional nucleic acid construct provided herein; ii) an RNA-guided DNA binding agent; and iii) an albumin guide RNA (gRNA); thereby increasing AAT secretion from the liver cell or the population of liver cells. In some embodiments the albumin gRNA comprises a sequence chosen from: a) a sequence that is at least 95%, SEQ ID Nos: 2-33; b) at least 17, 18, 19, or 20 contiguous nucleotides of a sequence selected from the group consisting of SEQ ID NOs: 2-33; c) a sequence selected from the group consisting of SEQ ID NOs: 2-33. In certain embodiments, the liver cell is a hepatocyte. In some embodiments, the cell or population of cells expresses functional AAT at a level that is increased by at least about 10%, 20%, 30%, 40%, 50%, 60%, 70%, 80%, 90%, 100%, or more, as compared to a level before administration.

[0023] In certain aspects, provided herein is a method of expressing alpha-1 antitrypsin (AAT) in a subject (e.g., a subject in need thereof), the method comprising administering to the subject a bidirectional nucleic acid construct provided herein. In certain embodiments, the method comprises administering to the subject: i) a bidirectional nucleic acid construct provided herein; ii) an RNA-guided DNA binding agent; and iii) an albumin guide RNA (gRNA); thereby expressing AAT in a subject. In some embodiments, the albumin guide RNA comprises a sequence chosen from: a) a sequence that is at least 95% identical to a sequence selected from the group consisting of SEQ ID Nos: 2-33; b) at least 17, 18, 19, or 20 contiguous nucleotides of a sequence selected from the group consisting of SEQ ID NOs: 2-33; and c) a sequence selected from the group consisting of SEQ ID NOs: 2-33.

[0024] In certain aspects, provided herein is a method of treating alpha-1 antitrypsin deficiency (AATD) in a subject (e.g., a subject in need thereof), the method comprising administering to the subject a bidirectional nucleic acid construct provided herein. In certain embodiments, the method comprises administering to the subject: i) a bidirectional nucleic acid construct provided herein; ii) an RNA-guided DNA binding agent; and iii) an albumin guide RNA (gRNA); thereby treating AATD in the subject. In some embodiments, the albumin guide RNA comprises a sequence chosen from: a) a sequence that is at least 95% identical to a sequence selected from the group consisting of SEQ ID Nos: 2-33; b) at least 17, 18, 19, or 20 contiguous nucleotides of a sequence selected from the group consisting of SEQ ID NOs: 2-33; and c) a sequence selected from the group consisting of SEQ ID NOs: 2-33.

[0025] In certain embodiments of the methods provided herein the subject's level of functional AAT is increased to at least about 500 μg/ml. In some embodiments, the subject's level of functional AAT is increased by at least about 10%, 20%, 30%, 40%, 50%, 60%, 70%, 80%, 90%, 100%, or more, as compared to the subject's level of functional AAT before administration. In some embodiments, the level of AAT is measured in serum or plasma. In certain embodiments, the level of AAT in serum is at least 500 μg/ml, at least 500 μg/ml, at least 571 μg/ml at least 750 μg/ml, at least 1000 μg/ml, 500-4000 μg/ml, 500-3500 μg/ml, 750-3500 μg/ml, 1000-3500 μg/ml, 1000-3000 μg/ml, or 1000-2700 μg/ml. In some embodiments, the level is measured at least 8 weeks, at least 9 weeks, at least 10 weeks, at least 11 weeks, or at least 12 weeks after the administration of the bidirectional nucleic acid construct. In certain embodiments, the level of functional AAT in the subject is maintained for at least a year following administration.

[0026] In certain embodiments of the methods provided herein, the subject has impaired liver or lung function. In some embodiments, administration delays progression of emphysema in the subject.

[0027] In certain embodiments, the methods provided herein further comprise reducing expression of the endogenous SERPINA1 gene without significantly reducing expression of the AAT polypeptide coding sequences of the bidirectional nucleic acid construct. In some embodiments, the method comprises administration of an endogenous SERPINA1 gene targeted nucleic acid agent. In some embodiments, the endogenous SERPINA1 gene targeted nucleic acid agent is an siRNA, a dsRNA, or a guide RNA. In certain embodiments, the endogenous SERPINA1 gene targeted nucleic acid agent is selected from an RNAi agent targeted to nucleotides 957-977, 1403-1425, or 1410-1436 of SEQ ID NO: 703, and a guide RNA targeted the endogenous SERPINA1 gene at a position corresponding to nucleotides 412-431, 506-525, or 538-557 of SEQ ID NO: 703.

[0028] In some embodiments, the methods provided herein further comprise inducing a double-stranded break (DSB) within the endogenous SERPINA1 gene. In some embodiments, the method comprises inducing a double-strand break (DSB) is induced within the endogenous SERPINA1 gene at a position corresponding to nucleotides 412-431, 506-525, or 538-557 of SEQ ID NO: 703. In certain embodiments, the method further comprises modifying the endogenous SERPINA1 gene. In some embodiments, the DSB is induced within the endogenous SERPINA1 gene or the endogenous SERPINA1 gene is modified after contacting the cell or population of cells or administering to the subject the bidirectional nucleic acid construct.

[0029] In some embodiments of the methods provided herein, the endogenous SERPINA1 gene targeted nucleic acid agent is a SERPINA1 guide RNA that is at least partially complementary to a target sequence present in exon 2, 3, 4, or 5 of the endogenous human SERPINA1 gene and that targets neither the first AAT polypeptide coding sequence nor the second AAT polypeptide coding sequences. In some embodiments, the endogenous SERPINA1 gene targeted nucleic acid agent is a SERPINA1 guide RNA that is at least partially complementary to a target sequence within the endogenous SERPINA1 gene at a position corresponding to nucleotides 412-431, 506-525, or 538-557 of SEQ ID NO: 703. In some embodiments, the SERPINA1 guide RNA comprises: a guide sequence selected from SEQ ID NOs: 1129-1131; a guide sequence that is at least 95% identical to SEQ ID NOs: 1129-1131; or 17, 18, 19, or 20 consecutive nucleotides of a sequence chosen from SEQ ID 15 NOs: 1129-1131.

[0030] In certain embodiments of the methods provided herein, the administration step is performed in vivo. In some embodiments, the nucleic acid construct is administered in a nucleic acid vector or a lipid nanoparticle. In some embodiments, the RNA-guided DNA binding agent or albumin gRNA is delivered or administered in a nucleic acid vector or lipid nanoparticle.

[0031] In certain embodiments provided herein, the RNA-guided DNA binding agent or SERPINA1 gRNA is delivered or administered in a nucleic acid vector or lipid nanoparticle. In some embodiments, the nucleic acid vector is a viral vector. In some embodiments, the viral vector is selected from an adeno associate viral (AAV) vector, adenovirus vector, retrovirus vector, and lentivirus vector. In some embodiments, the AAV vector is selected from the group consisting of AAV1, AAV2, AAV3, AAV3B, AAV4, AAV5, AAV6, AAV6.2, AAV7, AAVrh.64R1, AAVhu.37, AAVrh.8, AAVrh.32.33, AAV8, AAV9, AAV-DJ, AAV2/8, AAVrh10, AAVLK03, AV10, AAV11, AAV12, rh10, and hybrids thereof.

[0032] In certain embodiments of the methods provided herein, the RNA-guided DNA binding agent is a class 2 Cas nuclease. In some embodiments, the Cas nuclease is a Cas9 nuclease. In some embodiments, the Cas9 nuclease is an S. pyogenes Cas9 nuclease. In some embodiments, the Cas nuclease is cleavase.

[0033] In certain aspects, provided herein is a vector comprising a bidirectional nucleic acid construct provided herein. In some embodiments, the vector is an adeno-associated virus (AAV) vector. In certain embodiments, the AAV comprises a single-stranded genome (ssAAV) or a self-complementary genome (scAAV). In some embodiments, the AAV vector is selected from the group consisting of AAV1, AAV2, AAV3, AAV3B, AAV4, AAV5, AAV6, AAV6.2, AAV7, AAVrh.64R1, AAVhu.37, AAVrh.8, AAVrh.32.33, AAV8, AAV9, AAV-DJ, AAV2/8, AAVrh10, AAVLK03, AV10, AAV11, AAV12, rh10, and hybrids thereof. In some embodiments, the vector does not comprise a homology arm. In some embodiments, the vector is CpG depleted.

[0034] In certain aspects, provided herein is a lipid nanoparticle comprising a bidirectional nucleic acid construct provided herein.

[0035] In certain aspects, provided herein is a host cell comprising a bidirectional nucleic acid construct provided herein. In some embodiments, the host cell is a liver cell (e.g., a hepatocyte). In some embodiments, the host cell is a non-dividing cell type. In certain embodiments, the host cell expresses the AAT polypeptide encoded by the bidirectional construct.

[0036] In certain aspects, provided herein is a method of reducing endogenous alpha-1 antitrypsin (AAT) expression in a subject comprising a bidirectional nucleic acid construct provided herein (e.g., comprising in the genome of one or more of the subject's cells, such as their liver cells). In some embodiments, the method comprising administering to the subject: an RNA-guided DNA binding agent; and an endogenous SERPINA1 gene targeted nucleic acid agent that reducing expression of the endogenous SERPINA1 gene without significantly reducing expression of the AAT polypeptide coding sequences of the bidirectional nucleic acid construct.

[0037] In some embodiments of the methods provided herein, the endogenous SERPINA1 gene targeted nucleic acid agent is an siRNA, a dsRNA, or a guide RNA. In some embodiments, the endogenous SERPINA1 gene targeted nucleic acid agent is selected from an RNAi agent targeted to nucleotides 957-977, 1403-1425, or 1410-1436 of SEQ ID NO: 703, and a guide RNA targeted the endogenous SERPINA1 gene at a position corresponding to nucleotides 412-431, 506-525, or 538-557 of SEQ ID NO: 703.

[0038] In some embodiments, the method comprises inducing a double-stranded break (DSB) within the endogenous SERPINA1 gene. In certain embodiments, the method comprises inducing a double-strand break (DSB) is induced within the endogenous SERPINA1 gene at a position corresponding to nucleotides 412-431, 506-525, or 538-557 of SEQ ID NO: 703. In some embodiments, the method comprises modifying the endogenous SERPINA1 gene.

[0039] In certain embodiments, the SERPINA1 gene targeted nucleic acid agent is a SERPINA1 guide RNA that is at least partially complementary to a target sequence present in exon 2, 3, 4, or 5 of the endogenous human SERPINA1 gene and that targets neither the first AAT polypeptide coding sequence nor the second AAT polypeptide coding sequences. In some embodiments, the SERPINA1 gene targeted nucleic acid agent is a SERPINA1 guide RNA that is at least partially complementary to a target sequence within the endogenous SERPINA1 gene at a position corresponding to nucleotides 412-431, 506-525, or 538-557 of SEQ ID NO: 703. In some embodiments, the SERPINA1 guide RNA comprises: a guide sequence selected from SEQ ID NOs: 1129-1131; a guide sequence that is at least 95% identical to SEQ ID NOs: 1129-1131; or 17, 18, 19, or 20 consecutive nucleotides of a sequence chosen from SEQ ID NOs: 1129-1131.

[0040] In certain embodiments, the methods provided herein further comprise reducing expression of the endogenous SERPINA1 gene without significantly reducing expression of the AAT polypeptide coding sequences of the bidirectional nucleic acid construct.

[0041] In some embodiments of the methods provided herein, the subject has elevated liver enzymes. In some embodiments, the subject has at least 2×, at least 2.5× at least 3×, at least 3.5×, at least 4×, at least 4.5×, or at least 5×, upper limit of normal (ULN) of one or more liver enzymes. In some embodiments, the one or more liver enzymes is selected from alanine aminotransferase (ALT), and aspartate aminotransferase (AST). In certain embodiments, the method results in clinically relevant reduction of liver enzymes. In some embodiments, treatment results in reduction of the elevated liver enzymes to within 2×, 2.5×, 3×, 3.5×, 4×, 4.5×, or 5×ULN. In some embodiments, the method results in the treatment or prevention of liver fibrosis in the subject.

[0042] In certain embodiments, guide RNAs are used for the targeted insertion of a bidirectional nucleic acid construct provided herein into a human safe harbor site, such as intron 1 of an albumin safe harbor site. Also provided herein are donor constructs (e.g., a bidirectional nucleic acid construct provided herein), comprising a sequence encoding AAT, for use in targeted insertion into a human safe harbor site, such as intron 1 of an albumin safe harbor site. In some embodiments, the bidirectional nucleic acid construct provided herein can be used with any one or more gene editing systems (e.g., CRISPR/Cas system; zinc finger nuclease (ZFN) system; transcription activator-like effector nuclease (TALEN) system).

[0043] In some embodiments, the present disclosure provides a method of introducing a SERPINA1 nucleic acid to a cell or population of cells, comprising administering: i) a bidirectional nucleic acid construct provided herein; ii) an RNA-guided DNA binding agent; and iii) an albumin guide RNA (gRNA) comprising a sequence chosen from: a) a sequence that is at least 95%, 90%, 85%, 80%, or 75% identical to a sequence selected from the group consisting of SEQ ID NOs: 2-33; b) at least 17, 18, 19, or 20 contiguous nucleotides of a sequence selected from the group consisting of SEQ ID NOs: 2-33; c) a sequence that is at least 95%, 90%, 85%, 80%, or 75% identical to a sequence selected from the group consisting of SEQ ID NOs: 2-33; and d) a sequence that is complementary to 15 consecutive nucleotides+/−5 nucleotides of the genomic coordinates listed for SEQ ID NOs: 2-33, thereby introducing the SERPINA1 nucleic acid to the cell or population of cells.

[0044] In some embodiments, the present disclosure provides a method of expressing AAT in a subject in need thereof, comprising administering: i) a bidirectional nucleic acid construct provided herein; ii) an RNA-guided DNA binding agent; and iii) an albumin guide RNA (gRNA) comprising a sequence chosen from: a) a sequence that is at least 95%, 90%, 85%, 80%, or 75% identical to a sequence selected from the group consisting of SEQ ID Nos: 2-33; b) at least 17, 18, 19, or 20 contiguous nucleotides of a sequence selected from the group consisting of SEQ ID NOs: 2-33; c) a sequence that is at least 95%, 90%, 85%, 80%, or 75% identical to a sequence selected from the group consisting of SEQ ID NOs: 2-33; and d) a sequence that is complementary to 15 consecutive nucleotides+/−5 nucleotides of the genomic coordinates listed for SEQ ID NOs: 2-33, thereby expressing AAT in a subject in need thereof.

[0045] In some embodiments, the present disclosure provides a method of treating alpha-1 antitrypsin deficiency (AATD) in a subject in need of AAT protein, comprising administering: i) a bidirectional nucleic acid construct provided herein; ii) an RNA-guided DNA binding agent; and iii) an albumin guide RNA (gRNA) comprising a sequence chosen from: a) a sequence that is at least 95%, 90%, 85%, 80%, or 75% identical to a sequence selected from the group consisting of SEQ ID Nos: 2-33; b) at least 17, 18, 19, or 20 contiguous nucleotides of a sequence selected from the group consisting of SEQ ID NOs: 2-33; c) a sequence that is at least 95%, 90%, 85%, 80%, or 75% identical to a sequence selected from the group consisting of SEQ ID NOs: 2-33; and d) a sequence that is complementary to 15 consecutive nucleotides+/−5 nucleotides of the genomic coordinates listed for SEQ ID NOs: 2-33, thereby treating AATD in the subject.

[0046] In some embodiments, the present disclosure provides a method of increasing AAT secretion from a liver cell or population of cells, comprising administering: i) a bidirectional nucleic acid construct provided herein; ii) an RNA-guided DNA binding agent; and iii) an albumin guide RNA (gRNA) comprising a sequence chosen from: a) a sequence that is at least 95%, 90%, 85%, 80%, or 75% identical to a sequence selected from the group consisting of SEQ ID Nos: 2-33; b) at least 17, 18, 19, or 20 contiguous nucleotides of a sequence selected from the group consisting of SEQ ID NOs: 2-33; c) a sequence that is at least 95%, 90%, 85%, 80%, or 75% identical to a sequence selected from the group consisting of SEQ ID NOs: 2-33; and d) a sequence that is complementary to 15 consecutive nucleotides+/−5 nucleotides of the genomic coordinates listed for SEQ ID NOs: 2-33, thereby increasing AAT secretion from the liver cell or the population of cells.

[0047] In some embodiments, the bidirectional nucleic acid construct, RNA-guided DNA binding agent, albumin gRNA, and SERPINA1 gRNA are delivered or administered sequentially, in any order or in any combination.

[0048] In some embodiments, the bidirectional nucleic acid construct, RNA-guided DNA binding agent, albumin gRNA, and SERPINA1 gRNA, individually or in any combination, are delivered or administered simultaneously.

[0049] In some embodiments, the RNA-guided DNA binding agent, or RNA-guided DNA binding agent and albumin gRNA in combination, is delivered or administered prior to administering the bidirectional nucleic acid construct.

[0050] In some embodiments, the bidirectional nucleic acid construct is delivered or administered prior to delivering or administering the albumin gRNA or RNA-guided DNA binding agent

### BRIEF DESCRIPTION OF THE DRAWINGS

[0051] The patent or application file contains at least one drawing executed in color. Copies of this patent or patent application publication with color drawing(s) will be provided by the Office upon request and payment of the necessary fee.

[0052] FIG. 1 shows the percent editing via indel formation in hSERPINA1 PIZ variant transgene in mouse liver after administration of LNP formulated guide RNAs G000409, G000414, or G000415 targeted to human SERPINA1.

[0053] FIGS. 2A and 2B show hA1AT serum levels (A) in μg/ml and (B) relative to control treated (% TSS) in hSERPINA1 PIZ variant transgene in mouse liver after administration of LNP formulated guide RNAs G000409, G000414, or G000415 targeted to human SERPINA1.

[0054] FIG. 3 shows A1AT protein expression (ng/ml) in primary mouse hepatocytes (PMH) after administration of various bidirectional constructs encoding human A1AT with various codon usages in AAV vectors.

[0055] FIGS. 4A and 4B show (A) serum hA1AT and (B) serum ALT activity levels in wild type (NGS) mice or in the PIZ transgenic mouse after administration of bidirectional constructs encoding hSERPINA1 or nanoluc in an AAV vector.

[0056] FIG. 5 shows A1AT protein expression in primary mouse hepatocytes (PMH) administration of various bidirectional constructs encoding human A1AT with various codon usages in AAV vectors.

[0057] FIGS. 6A-6C show results from a dose response study after administration of various bidirectional constructs (A) Construct 7, (B) Construct 8, and (C) Construct 9, each encoding human A1AT with various codon usages in AAV vectors.

[0058] FIG. 7 shows the percent editing (indel formation) in the cynomolgus albumin locus on Day 14 after treatment with G009860 and Construct 1, or treatment with vehicle.

[0059] FIG. 8 shows percent editing (indel formation) in cSERPINA1 on Day 259 of the study, 14 days after treatment with G014418, a cynomolgus specific SERPINA1 guide, or treatment with vehicle.

[0060] FIGS. 9A and 9B serum (A) hA1AT and (B) cA1AT assessed at the time points indicated. Bidirectional Construct 1 was administered on Day 1. Cynomolgus specific SERPINA1 guide G014418 was administered at Day 244 (indicated with arrow).

[0061] FIG. 10 shows percent editing (indel formation) in the cynomolgus albumin locus on Day 14 after treatment with G009860 and Construct 7 or Construct 8, or treatment with vehicle.

[0062] FIG. 11 shows circulating hA1AT levels in cynomolgus monkeys after treatment on Day 1 with G009860 and Construct 7 or Construct 8, or treatment with vehicle, at the indicated time points. The shaded area indicates normal levels of hA1AT in circulation (about 1000-2700 μg/ml or 20-53 μM).

[0063] FIGS. 12A and 12B show expression of AAT from expression constructs Alb-A1AT and Native-A1AT (FIG. 12A) and the percent inhibition of neutrophil elastase (FIG. 12B).

[0064] FIGS. 13A and 13B show hA1AT protein levels as measured by ELISA at Day 28 (pre-dose), and at Day 32 (post-dose) (FIG. 13A) and the percent knockdown of AAT following dosing of either siRNA2 or siRNA3 (FIG. 13B).

[0065] FIG. 14 shows serum hA1AT levels at one week and two weeks post dose. Asterisk (*) indicates 4 animals per group.

### DETAILED DESCRIPTION

[0066] Reference will now be made in detail to certain embodiments of the invention, examples of which are illustrated in the accompanying drawings. While the present teachings are described in conjunction with various embodiments, it is not intended to limit the invention to those embodiments. On the contrary, the present teachings encompass various alternatives, modifications, and equivalents, as will be appreciated by those of skill in the art.

[0067] Before describing the present teachings in detail, it is to be understood that the disclosure is not limited to specific compositions or process steps, as such may vary. It should be noted that, as used in this specification and the appended embodiments, the singular form “a,” “an,” and “the” include plural references unless the context dictates otherwise. Thus, for example, reference to “a conjugate” includes a plurality of conjugates and reference to “a cell” includes a plurality of cells and the like. As used herein, the term “include” and its grammatical variants are intended to be non-limiting, such that recitation of items in a list is not to the exclusion of other like items that can be substituted or added to the listed items.

[0068] Numeric ranges are inclusive of the numbers defining the range. Measured and measurable values are understood to be approximate, taking into account significant digits and the error associated with the measurement. Also, the use of “comprise,” “comprises,” “comprising,” “contain,” “contains,” “containing,” “include,” “includes,” and “including” are not intended to be limiting. It is to be understood that both the foregoing general description and detailed description are exemplary and explanatory only and are not restrictive of the teachings.

[0069] Unless specifically noted in the specification, embodiments in the specification that recite “comprising” various components are also contemplated as “consisting of” or “consisting essentially of” the recited components; embodiments in the specification that recite “consisting of” various components are also contemplated as “comprising” or “consisting essentially of” the recited components; and embodiments in the specification that recite “consisting essentially of” various components are also contemplated as “consisting of” or “comprising” the recited components (this interchangeability does not apply to the use of these terms in the embodiments).

[0070] The term “or” is used in an inclusive sense, i.e., equivalent to “and/or,” unless the context clearly indicates otherwise.

[0071] The term “about,” when used before a list, modifies each member of the list. The term “about” or “approximately” means an acceptable error for a particular value as determined by one of ordinary skill in the art, which depends in part on how the value is measured or determined.

[0072] The term “at least” prior to a number or series of numbers is understood to include the number adjacent to the term “at least”, and all subsequent numbers or integers that could logically be included, as clear from context. For example, the number of nucleotides in a nucleic acid molecule must be an integer. For example, “at least 17 nucleotides of a 20 nucleotide nucleic acid molecule” means that 17, 18, 19, or 20 nucleotides have the indicated property. When at least is present before a series of numbers or a range, it is understood that “at least” can modify each of the numbers in the series or range.

[0073] As used herein, “no more than” or “less than” is understood as the value adjacent to the phrase and logical lower values or integers, as logical from context, to zero. For example, a duplex region of “no more than 2 nucleotide base pairs” has a 2, 1, or 0 nucleotide base pairs. When “no more than” or “less than” is present before a series of numbers or a range, it is understood that each of the numbers in the series or range is modified. As used herein, ranges include both the upper and lower limit.

[0074] As used herein, it is understood that when the maximum amount of a value is represented by 100% (e.g., 100% inhibition) that the value is limited by the method of detection. For example, 100% inhibition is understood as inhibition to a level below the level of detection of the assay.

[0075] The section headings used herein are for organizational purposes only and are not to be construed as limiting the desired subject matter in any way. In the event that any material incorporated by reference contradicts any term defined in this specification or any other express content of this specification, this specification controls.

### I. Definitions

[0076] Unless stated otherwise, the following terms and phrases as used herein are intended to have the following meanings:

[0077] “Polynucleotide” and “nucleic acid” are used herein to refer to a multimeric compound comprising nucleosides or nucleoside analogs which have nitrogenous heterocyclic bases or base analogs linked together along a backbone, including conventional RNA, DNA, mixed RNA-DNA, and polymers that are analogs thereof. A nucleic acid “backbone” can be made up of a variety of linkages, including one or more of sugar-phosphodiester linkages, peptide-nucleic acid bonds (“peptide nucleic acids” or PNA; PCT No. WO 95/32305), phosphorothioate linkages, methylphosphonate linkages, or combinations thereof. Sugar moieties of a nucleic acid can be ribose, deoxyribose, or similar compounds with optional substitutions, e.g., 2′ methoxy or 2′ halide substitutions. Nitrogenous bases can be conventional bases (A, G, C, T, U), analogs thereof (e.g., modified uridines such as 5-methoxyuridine, pseudouridine, or N1-methylpseudouridine, or others); inosine; derivatives of purines or pyrimidines (e.g., N⁴-methyl deoxyguanosine, deaza- or aza-purines, deaza- or aza-pyrimidines, pyrimidine bases with substituent groups at the 5 or 6 position (e.g., 5-methylcytosine), purine bases with a substituent at the 2, 6, or 8 positions, 2-amino-6-methylaminopurine, O⁶-methylguanine, 4-thio-pyrimidines, 4-amino-pyrimidines, 4-dimethylhydrazine-pyrimidines, and O⁴-alkyl-pyrimidines; U.S. Pat. No. 5,378,825 and PCT No. WO 93/13121). For general discussion, see The Biochemistry of the Nucleic Acids 5-36, Adams et al., ed., 11^{th} ed., 1992). Nucleic acids can include one or more “abasic” residues where the backbone includes no nitrogenous base for position(s) of the polymer (U.S. Pat. No. 5,585,481). A nucleic acid can comprise only conventional RNA or DNA sugars, bases and linkages, or can include both conventional components and substitutions (e.g., conventional nucleosides with 2′ methoxy substituents, or polymers containing both conventional nucleosides and one or more nucleoside analogs). Nucleic acid includes “locked nucleic acid” (LNA), an analogue containing one or more LNA nucleotide monomers with a bicyclic furanose unit locked in an RNA mimicking sugar conformation, which enhance hybridization affinity toward complementary RNA and DNA sequences (Vester and Wengel, 2004, Biochemistry 43(42):13233-41). RNA and DNA have different sugar moieties and can differ by the presence of uracil or analogs thereof in RNA and thymine or analogs thereof in DNA.

[0078] “Guide RNA,” “gRNA,” and simply “guide” are used herein interchangeably to refer to either a guide that comprises a guide sequence, e.g. either a crRNA (also known as CRISPR RNA), or the combination of a crRNA and a trRNA (also known as tracrRNA crRNA (also known as CRISPR RNA), or the combination of a crRNA and a trRNA (also known as tracrRNA). The crRNA and trRNA may be associated as a single RNA molecule (single guide RNA, sgRNA) or, for example, in two separate RNA molecules (dual guide RNA, dgRNA). “Guide RNA” or “gRNA” refers to each type. The trRNA may be a naturally-occurring sequence, or a trRNA sequence with modifications or variations compared to naturally-occurring sequences. Guide RNAs, such as sgRNAs or dgRNAs, can include modified RNAs as described herein.

[0079] As used herein, a “guide sequence” refers to a sequence within a guide RNA that is complementary to a target sequence and functions to direct a guide RNA to a target sequence for binding or modification (e.g., cleavage) by an RNA-guided DNA binding agent. A “guide sequence” may also be referred to as a “targeting sequence,” or a “spacer sequence.” A guide sequence can be 20 base pairs in length, e.g., in the case of Streptococcus pyogenes (i.e., Spy Cas9) and related Cas9 homologs/orthologs. Shorter or longer sequences can also be used as guides, e.g., 15-, 16-, 17-, 18-, 19-, 21-, 22-, 23-, 24-, or 25-nucleotides in length. For example, in some embodiments, the guide sequence comprises at least 15, 16, 17, 18, 19, or 20 contiguous nucleotides of an albumin guide sequence selected from SEQ ID NOs: 2-33 or SERPINA1 guide sequence selected from SEQ ID Nos: 1000-1131. In some embodiments, the target sequence is in a gene or on a chromosome, for example, and is complementary to the guide sequence. In some embodiments, the degree of complementarity or identity between a guide sequence and its corresponding target sequence may be about 75%, 80%, 85%, 90%, 95%, or 100%. For example, in some embodiments, the guide sequence comprises a sequence with about 75%, 80%, 85%, 90%, 95%, or 100% identity to at least 15, 16, 17, 18, 19, or 20 contiguous nucleotides of an albumin guide sequence selected from SEQ ID NOs: 2-33 or SERPINA1 guide sequence selected from SEQ ID Nos: 1000-1131. In some embodiments, the guide sequence and the target region may be 100% complementary or identical. In other embodiments, the guide sequence and the target region may contain at least one mismatch. For example, the guide sequence and the target sequence may contain 1, 2, 3, or 4 mismatches, where the total length of the target sequence is at least 15, 16, 17, 18, 19, 20 or more base pairs. In some embodiments, the guide sequence and the target region may contain 1-4 mismatches where the guide sequence comprises at least 15, 16, 17, 18, 19, 20 or more nucleotides. In some embodiments, the guide sequence and the target region may contain 1, 2, 3, or 4 mismatches where the guide sequence comprises 20 nucleotides.

[0080] Target sequences for RNA-guided DNA binding agents include both the positive and negative strands of genomic DNA (i.e., the sequence given and the sequence's reverse complement), as a nucleic acid substrate for an RNA-guided DNA binding agent is a double stranded nucleic acid. Accordingly, where a guide sequence is said to be “complementary to a target sequence,” it is to be understood that the guide sequence may direct a guide RNA to bind to the sense or antisense strand (e.g. reverse complement) of a target sequence. Thus, in some embodiments, where the guide sequence binds the reverse complement of a target sequence, the guide sequence is identical to certain nucleotides of the target sequence (e.g., the target sequence not including the PAM) except for the substitution of U for T in the guide sequence.

[0081] As used herein, an “RNA-guided DNA-binding agent” means a polypeptide or complex of polypeptides having RNA and DNA binding activity, or a DNA-binding subunit of such a complex, wherein the DNA binding activity is sequence-specific and depends on the sequence of the RNA. The term RNA-guided DNA binding-agent also includes nucleic acids encoding such polypeptides. Exemplary RNA-guided DNA-binding agents include Cas cleavases/nickases. Exemplary RNA-guided DNA-binding agents may include inactivated forms thereof (“dCas DNA-binding agents”), e.g. if those agents are modified to permit DNA cleavage, e.g. via fusion with a FokI cleavase domain. “Cas nuclease,” as used herein, encompasses Cas cleavases and Cas nickases. Cas cleavases and Cas nickases include a Csm or Cmr complex of a type III CRISPR system, the Cas10, Csm1, or Cmr2 subunit thereof, a Cascade complex of a type I CRISPR system, the Cas3 subunit thereof, and Class 2 Cas nucleases. As used herein, a “Class 2 Cas nuclease” is a single-chain polypeptide with RNA-guided DNA binding activity. Class 2 Cas nucleases include Class 2 Cas cleavases/nickases (e.g., H840A, D10A, or N863A variants), which further have RNA-guided DNA cleavases or nickase activity, and Class 2 dCas DNA-binding agents, in which cleavase/nickase activity is inactivated”), if those agents are modified to permit DNA cleavage. Class 2 Cas nucleases include, for example, Cas9, Cpf1, C2c1, C2c2, C2c3, HF Cas9 (e.g., N497A, R661A, Q695A, Q926A variants), HypaCas9 (e.g., N692A, M694A, Q695A, H698A variants), eSPCas9(1.0) (e.g., K810A, K1003A, R1060A variants), and eSPCas9(1.1) (e.g., K848A, K1003A, R1060A variants) proteins and modifications thereof. Cpf1 protein, Zetsche et al., Cell, 163: 1-13 (2015) also contains a RuvC-like nuclease domain. Cpf1 sequences of Zetsche are incorporated by reference in their entirety. See, e.g., Zetsche, Tables S1 and S3. See, e.g., Makarova et al., Nat Rev Microbiol, 13(11): 722-36 (2015); Shmakov et al., Molecular Cell, 60:385-397 (2015). As used herein, delivery of an RNA-guided DNA-binding agent (e.g. a Cas nuclease, a Cas9 nuclease, or an S. pyogenes Cas9 nuclease) includes delivery of the polypeptide or mRNA.

[0082] As used herein, “ribonucleoprotein” (RNP) or “RNP complex” refers to a guide RNA together with an RNA-guided DNA binding agent, such as a Cas nuclease, e.g., a Cas cleavase, Cas nickase, or dCas DNA binding agent (e.g., Cas9). In some embodiments, the guide RNA guides the RNA-guided DNA binding agent such as Cas9 to a target sequence, and the guide RNA hybridizes with and the agent binds to the target sequence; in cases where the agent is a cleavase or nickase, binding can be followed by cleaving or nicking.

[0083] As used herein, a first sequence is considered to “comprise a sequence with at least X % identity to” a second sequence if an alignment of the first sequence to the second sequence shows that X % or more of the positions of the second sequence in its entirety are matched by the first sequence. For example, the sequence AAGA comprises a sequence with 100% identity to the sequence AAG because an alignment would give 100% identity in that there are matches to all three positions of the second sequence. The differences between RNA and DNA (generally the exchange of uridine for thymidine or vice versa) and the presence of nucleoside analogs such as modified uridines do not contribute to differences in identity or complementarity among polynucleotides as long as the relevant nucleotides (such as thymidine, uridine, or modified uridine) have the same complement (e.g., adenosine for all of thymidine, uridine, or modified uridine; another example is cytosine and 5-methylcytosine, both of which have guanosine or modified guanosine as a complement). Thus, for example, the sequence 5′-AXG where X is any modified uridine, such as pseudouridine, N1-methyl pseudouridine, or 5-methoxyuridine, is considered 100% identical to AUG in that both are perfectly complementary to the same sequence (5′-CAU). Exemplary alignment algorithms are the Smith-Waterman and Needleman-Wunsch algorithms, which are well-known in the art. One skilled in the art will understand what choice of algorithm and parameter settings are appropriate for a given pair of sequences to be aligned; for sequences of generally similar length and expected identity >50% for amino acids or >75% for nucleotides, the Needleman-Wunsch algorithm with default settings of the Needleman-Wunsch algorithm inteace provided by the EBI at the www.ebi.ac.uk web server is generally appropriate.

[0084] As used herein, a first sequence is considered to be “X % complementary to” a second sequence if X % of the bases of the first sequence base pairs with the second sequence. For example, a first sequence 5′AAGA3′ is 100% complementary to a second sequence 3′TTCT5′, and the second sequence is 100% complementary to the first sequence. In some embodiments, a first sequence 5′AAGA3′ is 100% complementary to a second sequence 3′TTCTGTGA5′, whereas the second sequence is 50% complementary to the first sequence.

[0085] As used herein, “CpG depleted” and the like are understood as modification of a nucleotide sequence to reduce, or preferably eliminate, the presence of CpG dinucleotides. CpG depletion in a coding sequence without changing the encoded amino acid sequence can be readily accomplished by alternative codon usage. As used herein, a CpG depleted coding sequence of an A1AT protein contains no more than 3 CpG dinucleotides (i.e., 3, 2, 1, or 0 CpG dinucleotides), preferably the coding sequence for an A1AT protein contains no CpG dinucleotides. It is understood that other portions of expression constructs may be selected or designed to have a minimal number of CpG dinucleotides (see, e.g., Wright J F, Mol Ther. 2020).

[0086] As used herein, “use of a non-wild type codon” is understood as modification of a coding sequence without changing the encoded amino acid sequence can be readily accomplished by alternative codon usage. As used herein, use of a non-wild type codon includes alternate codon usage for at least 10%, 20%, 30%, or 40% of the wild type codons with non-wild type codons within a defined region. As some regions defined herein may include codons that are partially within the region, the partial codon sequence is compared against the wild type sequence. If the partial codon includes a change from the wild type sequence within the defined region, the codon is considered to use a non-wild type codon. If the partial codon does not include a change from the wild type sequence within the defined region, the codon is considered to have wild-type codon usage.

[0087] As used herein, “mRNA” is used herein to refer to a polynucleotide that is entirely or predominantly RNA or modified RNA and comprises an open reading frame that can be translated into a polypeptide (i.e., can serve as a substrate for translation by a ribosome and amino-acylated tRNAs). mRNA can comprise a phosphate-sugar backbone including ribose residues or analogs thereof, e.g., 2′-methoxy ribose residues. In some embodiments, the sugars of an mRNA phosphate-sugar backbone consist essentially of ribose residues, 2′-methoxy ribose residues, or a combination thereof.

[0088] Exemplary guide sequences useful in the guide RNA compositions and methods described herein are shown in Table 1, Table 2, and throughout the application.

[0089] As used herein, “indels” refer to insertion/deletion mutations consisting of a number of nucleotides that are either inserted or deleted at the site of double-stranded breaks (DSBs) in a target nucleic acid.

[0090] As used herein, “heterologous alpha-1 antitrypsin” is used interchangeably with “heterologous AAT” or “heterologous A1AT” or “AAT/A1AT transgene,” which is the gene product of a SERPINA1 gene that is heterologous with respect to its insertion site. In some embodiments, the SERPINA1 gene is exogenous. The human wild-type AAT protein sequence is available at NCBI NP_000286; gene sequence is available at NCBI NM_000295. The human wild-type AAT cDNA has been sequenced (see, e.g., Long et al., “Complete sequence of the cDNA for human alpha 1-antitrypsin and the gene for the S variant,” Biochemistry 1984) and encodes a precursor molecule containing a signal peptide and a mature AAT peptide. Domains of the peptide responsible for intracellular targeting, carbohydrate attachment, catalytic function, protease inhibitory activity, etc., have been characterized (see, e.g., Kalsheker, “Alpha 1-antitrypsin: structure, function and molecular biology of the gene,” Biosci Rep. 1989; Matamala et al., “Identification of Novel Short C-Terminal Transcripts of Human SERPINA1 Gene,” PLoS One 2017; Niemann et al., “Isolation and serine protease inhibitory activity of the 44-residue, C-terminal fragment of alpha 1-antitrypsin from human placenta,” Matrix 1992). As used herein, heterologous AAT encompasses precursor AAT, mature AAT, and variants and fragments thereof, e.g., functional fragments, e.g., fragments that retain protease inhibitory activity (e.g., at least 60%, 70%, 80%, 85%, 90%, 92%, 94%, 96%, 98%, 99%, or 100%, compared to wild-type AAT, e.g., as assayed by a commercially available protease inhibition assay or human neutrophil elastase (HNE) inhibition assay). In some embodiments, the functional fragment is naturally occurring, e.g., a short C-terminal fragment. In some embodiments, the functional fragment is genetically engineered, e.g., a hyperactive functional fragment. Examples of the AAT protein sequence are described herein (e.g. SEQ ID NO: 700 or SEQ ID NO: 702). As used herein, heterologous AAT also encompasses a variant of AAT, e.g., a variant that possesses increased protease inhibitor activity as compared to wild type AAT. As used herein, heterologous AAT also encompasses a variant that is 80%, 85%, 90%, 93%, 95%, 97%, 99% identical to SEQ ID NO: 700, having functional activity—e.g., at least 60%, 70%, 80%, 85%, 90%, 92%, 94%, 96%, 98%, 99%, 100%, or more, activity as compared to wild type AAT, e.g., as assayed by HNE inhibition. As used herein, heterologous AAT also encompasses a fragment that possesses functional activity—e.g., at least 80%, 85%, 90%, 92%, 94%, 96%, 98%, 99%, 100%, or more, activity as compared to wild type AAT, e.g., as assayed by HNE inhibition. As used herein, heterologous AAT refers to an AAT, e.g. a functional AAT, useful in treating AATD, which may be wild-type AAT or a variant thereof useful in treating AATD.

[0091] As used herein, a “heterologous gene” refers to a gene that has been introduced as an exogenous source to a site within a host cell genome (e.g., at a genomic locus such as a safe harbor locus, including an albumin intron 1 site). A polypeptide expressed from such heterologous gene is referred to as a “heterologous polypeptide.” The heterologous gene can be naturally-occurring or engineered, and can be wild type or a variant. The heterologous gene may include nucleotide sequences other than the sequence that encodes the heterologous polypeptide. The heterologous gene can be a gene that occurs naturally in the host genome, as a wild type or a variant (e.g., mutant). For example, although the host cell contains the gene of interest (as a wild type or as a variant), the same gene or variant thereof can be introduced as an exogenous source for, e.g., expression at a locus that is highly expressed. The heterologous gene can also be a gene that is not naturally occurring in the host genome, or that expresses a heterologous polypeptide that does not naturally occur in the host genome. “Heterologous gene,” “exogenous gene,” and “transgene” are used interchangeably. In some embodiments, the heterologous gene or transgene includes an exogenous nucleic acid sequence, e.g. a nucleic acid sequence is not endogenous to the recipient cell. In certain embodiments, the heterologous gene can include an AAT nucleic acid sequence that does not naturally occur in the recipient cell. An AAT polypeptide coding sequence is a nucleic acid sequence that encodes for active polypeptide that inhibits elastase. For example, heterologous AAT may be heterologous with respect to its insertion site and with respect to its recipient cell.

[0092] As used herein, “mutant SERPINA1” or “mutant SERPINA1 allele” refers to a SERPINA1 sequence having a change in the nucleotide sequence of SERPINA1 compared to the wildtype sequence (NCBI Gene ID: 5265; NCBI NM_000295; Ensembl: Ensembl:ENSG00000197249). In some embodiments, a mutant SERPINA1 allele encodes a non-functional or non-secreted AAT protein.

[0093] As used herein, “AATD” or “A1AD” refers to alpha-1 antitrypsin deficiency. AATD comprises diseases and disorders caused by a variety of different genetic mutations in SERPINA1. AATD may refer to a disease where decreased levels of functional AAT are expressed (e.g., less than 100%, 90%, 80%, 70%, 60%, 50%, 40%, 30%, 20%, 10%, or 5% AAT gene or protein expression as compared to a control sample, e.g., by nephelometry or immunoturbidimetry, e.g., AAT less than about 100 mg/dL, 90 mg/dL, 80 mg/dL, 70 mg/dL, 60 mg/dL, 50 mg/dL, 40 mg/dL, 30 mg/dL, 20 mg/dL, 10 mg/dL, or 5 mg/dL in serum), functional AAT is not expressed, or a mutant or non-functional AAT is expressed (e.g., forms aggregates or is not capable of being secreted or has decreased protease inhibitor activity). See, e.g., Greulich and Vogelmeier, Ther Adv Respir Dis 2016; Stoller and Aboussouan, Lancet, 2005. In some embodiments, AATD refers to a disease where AAT is aggregated or accumulated intracellularly, e.g., in a hepatocyte, and not secreted, e.g., into circulation where it may be delivered to the lungs to function as a protease inhibitor. In some embodiments, AATD may be detected by PASD staining of liver tissue sections, e.g., to measure aggregation. In some embodiments, AATD may be detected by decreased inhibition of neutrophil elastase, e.g., in the lung.

[0094] As used herein, a “target sequence” refers to a sequence of nucleic acid in a target gene that has complementarity to the guide sequence of the gRNA. The interaction of the target sequence and the guide sequence directs an RNA-guided DNA binding agent to bind, and potentially nick or cleave (depending on the activity of the agent), within the target sequence.

[0095] As used herein, a “nucleic acid therapeutic agent” is understood as a therapeutic agent comprising a sufficient length of nucleotides to specifically hybridize to a target sequence in a target nucleic acid in a cell such that the hybridization reduces levels of a protein encoded by the target nucleic acid, e.g., by inhibiting translation or promoting sequence specific degradation of the target nucleic acid, or causing a change in the DNA encoding the protein resulting in a reduction of mRNA or protein expression. Exemplary nucleic acid therapeutic agents include RNAi agents, including Dicer Substrate (ds)RNAi agents, or antisense oligonucleotide agents; or RNA-guided DNA binding agents including CISPR, TALEN, or zinc finger nuclease (ZFN).

[0096] The terms “iRNA”, “RNAi agent,” “iRNA agent,”, “RNA interference agent”, “siRNA”, “siRNA agent” as used interchangeably herein, refer to an agent that contains RNA as that term is defined herein, and which mediates the targeted cleavage of an RNA transcript, e.g., via an RNA-induced silencing complex (RISC) pathway. iRNA directs the sequence-specific degradation of mRNA through a process known as RNA interference (RNAi). In general, an “iRNA” includes ribonucleotides with chemical modifications. Such modifications may include all types of modifications disclosed herein or known in the art. Any such modifications, as used in a dsRNA molecule, are encompassed by “iRNA” for the purposes of this specification and claims. The RNAi agent may or may not be processed by Dicer prior to entering the RISC pathway. That is, an RNAi agent is a nucleic acid therapeutic that acts by reducing the expression of a target gene, thereby reducing the expression of the polypeptide encoded by the target gene. Exemplary iRNA agents targeted to SERPINA1 are provided, for example, in WO2018098117, WO2015003113, and WO2015195628A2.

[0097] As used herein, a “nucleic acid therapeutic agent that reduces expression of SERPINA1” and the like as used herein is understood as a nucleic acid therapeutic agent that reduces levels of SERPINA1 RNA, A1AT protein encoded by SERPINA1, or both of SERPINA1 RNA and protein encoded by SERPINA1. In some embodiments, the nucleic acid therapeutic agent that reduces expression of SERPINA1 is a therapeutic agent that promotes the degradation of an mRNA encoding SERPINA1 or inhibits the translation of an mRNA encoding SERPINA1. Such agents include, but are not limited to, nucleic acid therapeutics, e.g., RNAi interference agents and antisense oligonucleotide agents. Such agents can typically inhibit expression of both endogenous wild type and mutant SERPINA1. In certain embodiments, expression of endogenous SERPINA1 may be inhibited while expression of a heterologous SERPINA1 is not inhibited due to the design of the heterologous coding sequence. As used herein, “normal” or “healthy” individuals include those individuals that do not have the AATD-associated alleles—e.g., AATD-associated alleles are ZZ, MZ, or SZ.

[0098] As used herein, “treatment” refers to any administration or application of a therapeutic for disease or disorder in a subject, and includes inhibiting the disease, arresting its development, relieving one or more symptoms of the disease, curing the disease, or preventing reoccurrence of one or more symptoms of the disease. AATD may be associated with lung disease or liver disease; wheezing or shortness of breath; increased risk of lung infections; chronic obstructive pulmonary disease (COPD); bronchitis, asthma, dyspnea; cirrhosis; neonatal jaundice; panniculitis; chronic cough or phlegm; recurring chest colds; yellowing of the skin or the white part of the eyes; swelling of the belly or legs. For example, treatment of AATD may comprise alleviating symptoms of AATD, e.g., liver or lung symptoms. In some embodiments, treatment refers to increasing serum AAT levels, e.g., to protective levels. In some embodiments, treatment refers to increasing serum AAT levels, e.g., within the normal range. In some embodiments, treatment refers to increasing serum AAT levels, e.g., above 40, 50, 60, 70, 80, 90, or 100 mg/dL, e.g., as measured using nephelometry or immunoturbidimetry and a purified standard. In some embodiments, treatment refers to improvement in baseline serum AAT as compared to control, e.g., before and after treatment. In some embodiments, treatment refers to an improvement in histologic grading of AATD associated liver disease, e.g., by 1, 2, 3, or more points, as compared to control, e.g., before and after treatment. In some embodiments, treatment refers to improvement in Ishak fibrosis score as compared to control, e.g., before and after treatment. In some embodiments, treatment refers to improvement in genotype serum level, AAT lung function, spirometry test, chest X-ray of lung, CT scan of lung, blood testing of liver function, or ultrasound of liver.

[0099] As used herein, “knockdown” refers to a decrease in expression of a particular gene product (e.g., protein, mRNA, or both). Knockdown of a protein can be measured by, for example, detecting protein secreted by tissue or population of cells (e.g., in serum or cell media) or by detecting total cellular amount of the protein from a tissue or cell population of interest. Methods for measuring knockdown of mRNA are known, and include sequencing of mRNA isolated from a tissue or cell population of interest. In some embodiments, “knockdown” may refer to some loss of expression of a particular gene product, for example a decrease in the amount of mRNA transcribed or a decrease in the amount of protein expressed or secreted by a population of cells (including in vivo populations such as those found in tissues). In some embodiments, the methods of the disclosure “knockdown” endogenous AAT in one or more cells (e.g., in a population of cells including in vivo populations such as those found in tissues). Relevant cells include cells that are capable of producing AAT. In some embodiments, the methods provided herein knockdown an endogenous mutant SERPINA1 allele, or an endogenous wildtype SERPINA1 allele (e.g., in a heterozygous MZ individual).

[0100] As used herein, “knockout” refers to a loss of expression of a particular protein in a cell. Knockout can be measured either by detecting the amount of protein secretion from a tissue or population of cells (e.g., in serum or cell media) or by detecting total cellular amount of a protein a tissue or a population of cells. Relevant cells include cells that are capable of producing AAT. In some embodiments, the methods provided herein “knockout” endogenous AAT in one or more cells (e.g., in a population of cells including in vivo populations such as those found in tissues). In some embodiments, the methods of the of the disclosure knockout an endogenous mutant SERPINA1 allele, or an endogenous wildtype SERPINA1 allele (e.g., in a heterozygous MZ individual). In some embodiments, a knockout is the complete loss of expression of endogenous AAT protein in a cell.

[0101] As used herein, “polypeptide” refers to a wild-type or variant protein (e.g., mutant, fragment, fusion, or combinations thereof). A variant polypeptide may possess at least or about 5%, 10%, 15%, 20%, 30%, 35%, 40%, 45%, 50%, 55%, 60%, 65%, 70%, 75%, 80%, 85%, 90%, 95%, or 100% functional activity of the wild-type polypeptide. In some embodiments, the variant is at least 70%, 75%, 80%, 85%, 90%, 92%, 93%, 94%, 95%, 96%, 97%, 98%, or 99% identical to the sequence of the wild-type polypeptide. In some embodiments, a variant polypeptide may be a hyperactive variant. In certain instances, the variant possesses between about 80% and about 120%, 140%, 160%, 180%, 200% of the functional activity of the wild-type polypeptide.

[0102] As used herein, a “bidirectional nucleic acid construct” (interchangeably referred to herein as “bidirectional construct”) comprises at least two nucleic acid segments, wherein one segment (the first segment) comprises a coding sequence that encodes a polypeptide of interest (the coding sequence may be referred to herein as “transgene” or a first transgene), while the other segment (the second segment) comprises a sequence wherein the complement of the sequence encodes a polypeptide of interest, or a second transgene. That is, the at least two segments can encode identical or different polypeptides. When the two segments encode the identical polypeptide, the coding sequence of the first segment need not be identical to the complement of the sequence of the second segment. In some embodiments, the sequence of the second segment is a reverse complement of the coding sequence of the first segment. A bidirectional construct can be single-stranded or double-stranded. The bidirectional construct disclosed herein encompasses a construct that is capable of expressing any polypeptide of interest.

[0103] As used herein, a “reverse complement” refers to a sequence that is a complement sequence of a reference sequence, wherein the complement sequence is written in the reverse orientation. For example, for a hypothetical sequence 5′ CTGGACCGA 3′ (SEQ ID NO: 500), the “perfect” complement sequence is 3′ GACCTGGCT 5′ (SEQ ID NO: 501), and the “perfect” reverse complement is written 5′ TCGGTCCAG 3′ (SEQ ID NO: 502). A reverse complement sequence need not be “perfect” and may still encode the same polypeptide or a similar polypeptide as the reference sequence. Due to codon usage redundancy, a reverse complement can diverge from a reference sequence that encodes the same polypeptide. As used herein, “reverse complement” also includes sequences that are, e.g., 30%, 35%, 40%, 45%, 50%, 55%, 60%, 65%, 70%, 75%, 80%, 85%, 90%, 91%, 92%, 93%, 94%, 95%, 96%, 97%, 98%, 99%, or 100% identical to the reverse complement sequence of a reference sequence.

[0104] In some embodiments, a bidirectional nucleic acid construct comprises a first segment that comprises a coding sequence that encodes a first polypeptide (a first transgene), and a second segment that comprises a sequence wherein the complement of the sequence encodes a second polypeptide (a second transgene). In some embodiments, the first and the second polypeptides are at least 50%, 55%, 60%, 65%, 70%, 75%, 80%, 85%, 90%, 91%, 92%, 93%, 94%, 95%, 96%, 97%, 98%, 99%, or 100% identical. In some embodiments, the first and the second polypeptides comprise an amino acid sequence that is at least 80%, 85%, 90%, 91%, 92%, 93%, 94%, 95%, 96%, 97%, 98%, 99%, or 100% identical, e.g. across 50, 100, 200, 500, 1000 or more amino acid residues.

[0105] A “safe harbor” locus is a locus within the genome wherein a gene may be inserted without significant deleterious effects on the host cell, e.g. hepatocyte, e.g., without causing apoptosis, necrosis, or senescence, or without causing more than 5%, 10%, 15%, 20%, 25%, 30%, or 40% apoptosis, necrosis, or senescence as compared to a control cell. See, e.g., Hsin et al., “Hepatocyte death in liver inflammation, fibrosis, and tumorigenesis,” 2017. In some embodiments, a safe harbor locus allows overexpression of an exogenous gene without significant deleterious effects on the host cell, e.g. hepatocyte, without causing apoptosis, necrosis, or senescence, or without causing more than 5%, 10%, 15%, 20%, 25%, 30%, or 40% apoptosis, necrosis, or senescence as compared to a control cell. In some embodiments, a desirable safe harbor locus may be one in which expression of the inserted gene sequence is not perturbed by read-through expression from neighboring genes. The safe harbor may be within an albumin gene, such as a human albumin gene. The safe harbor may be within an albumin intron 1 region, e.g., human albumin intron 1. The safe harbor may be a human safe harbor, e.g., for a liver tissue or hepatocyte host cell. In some embodiments, a safe harbor allows overexpression of an exogenous gene without significant deleterious effects on the host cell or cell population, such as hepatocytes or liver cells, e.g. without causing apoptosis, necrosis, or senescence, or without causing more than 5%, 10%, 15%, 20%, 25%, 30%, or 40% apoptosis, necrosis, or senescence as compared to a control cell.

[0106] In some embodiments, the gene may be inserted into a safe harbor locus and use the safe harbor locus's endogenous signal sequence, e.g., the albumin signal sequence encoded by exon 1. For example, an AAT coding sequence may be inserted into human albumin intron 1 such that it is downstream of and fuses to the signal sequence of human albumin exon 1.

[0107] In some embodiments, the gene may comprise its own signal sequence, may be inserted into the safe harbor locus, and may further use the safe harbor locus's endogenous signal sequence. For example, an AAT coding sequence comprising an AAT signal sequence may be inserted into human albumin intron 1 such that it is downstream of and fuses to the signal sequence of human albumin encoded by exon 1.

[0108] In some embodiments, the gene may comprise its own signal sequence and an internal ribosomal entry site (IRES), may be inserted into the safe harbor locus, and may further use the safe harbor locus's endogenous signal sequence. For example, an AAT coding sequence comprising an AAT signal sequence and an IRES sequence may be inserted into human albumin intron 1 such that it is downstream of and fuses to the signal sequence of human albumin encoded by exon 1.

[0109] In some embodiments, the gene may comprise its own signal sequence and IRES, may be inserted into the safe harbor locus, and does not use the safe harbor locus's endogenous signal sequence. For example, an AAT coding sequence comprising an AAT signal sequence and an IRES sequence may be inserted into human albumin intron 1 such that it does not fuse to the signal sequence of human albumin encoded by exon 1. In these embodiments, the protein is translated from the IRES site and is not chimeric (e.g., albumin signal peptide fused to AAT protein), which may be advantageously non- or low-immunogenic. In some embodiments, the protein is not secreted or transported extracellularly.

[0110] In some embodiments, the gene may be inserted into the safe harbor locus and may comprise an IRES and does not use any signal sequence. For example, an AAT coding sequence comprising an IRES sequence and no AAT signal sequence may be inserted into human albumin intron 1 such that it does not fuse to the signal sequence of human albumin encoded by exon 1. In some embodiments, the proteins is translated from the IRES site without the need for any signal sequence. In some embodiments, the proteins is not transported extracellularly.

[0111] As used herein, a cell that is not undergoing mitotic cell division is referred to as a “non-dividing” cell. A “non-dividing” cell encompasses cell types that never or rarely undergo mitotic cell division, e.g., many types of neurons. A “non-dividing” cell also encompasses cells that are capable of, but not undergoing or about to undergo, mitotic cell division, e.g., a quiescent cell. Liver cells, for example, retain the ability to divide (e.g., when injured or resected), but do not typically divide. During mitotic cell division, homologous recombination is a mechanism by which the genome is protected and double-stranded breaks are repaired. In some embodiments, a “non-dividing” cell refers to a cell in which homologous recombination (HR) is not the primary mechanism by which double-stranded DNA breaks are repaired in the cell, e.g., as compared to a control dividing cell. In some embodiments, a “non-dividing” cell refers to a cell in which non-homologous end joining (NHEJ) is the primary mechanism by which double-stranded DNA breaks are repaired in the cell, e.g., as compared to a control dividing cell.

[0112] Non-dividing cell types have been described in the literature, e.g. by active NHEJ double-stranded DNA break repair mechanisms. See, e.g. Iyama, DNA Repair (Amst.) 2013, 12(8): 620-636. In some embodiments, the host cell includes, but is not limited to, a liver cell, a muscle cell, or a neuronal cell. In some embodiments, the host cell is a hepatocyte, such as a mouse, cynomolgus, or human hepatocyte. In some embodiments, the host cell is a myocyte, such as a mouse, cynomolgus, or human myocyte. In some embodiments, provided herein is a host cell, described above, that comprises the bidirectional construct disclosed herein. In some embodiments the host cell expresses the transgene polypeptide encoded by the bidirectional construct disclosed herein. In some embodiments, provided herein is a host cell made by a method disclosed herein. In certain embodiments, the host cell is made by administering or delivering to a host cell a bidirectional nucleic acid construct described herein, and a gene editing system such as a ZFN, TALEN, or CRISPR/Cas9 system.

### II. Compositions

A. Compositions Comprising Safe Harbor Albumin Guide RNA (gRNAs) or SERPINA1 Guide RNA (gRNAs)

[0113] Provided herein are albumin guide RNA compositions, AAT template compositions, and methods useful for inserting and expressing a heterologous AAT gene (e.g., a functional or wild-type AAT) within a genomic locus such as a safe harbor gene of a host cell. In particular, as exemplified herein, targeting and inserting a heterologous AAT gene at the albumin locus (e.g., at intron 1) allows the use of albumin's endogenous promoter to drive robust expression of the heterologous AAT gene. The present disclosure is based, in part, on the identification of albumin guide RNAs that specifically target sites within intron 1 of the albumin gene, SERPINA1 nucleic acid sequences with alternative codon usage, and guide RNAs that bind to endogenous SERPINA1 nucleic acids but not the SERPINA1 nucleic acids with alternative codon usage. As shown in the Examples and further described herein, expression of the AAT transgene is unaffected by simultaneous or non-simultaneous administrating of gRNAs (or siRNAs) that specifically target endogenous SERPINA1 nucleic acids.

[0114] In some embodiments, disclosed herein are compositions useful for introducing or inserting a heterologous AAT gene (e.g., a functional or wild-type AAT) within a locus such as an albumin locus (e.g., intron 1) of a host cell, e.g., using an albumin guide RNA disclosed herein with an RNA-guided DNA binding agent (e.g., Cas nuclease), and a construct (e.g., donor construct or template) comprising a heterologous AAT nucleic acid (“AAT transgene”). In some embodiments, disclosed herein are compositions useful for expressing a heterologous AAT gene at an albumin locus of a host cell, e.g., using an albumin guide RNA disclosed herein with an RNA-guided DNA binding agent and a construct (e.g., donor) comprising a heterologous AAT nucleic acid. In some embodiments, disclosed herein are compositions useful for expressing a heterologous AAT at an albumin locus of a host cell, e.g., using an albumin guide RNA disclosed herein with an RNA-guided DNA binding agent and a bidirectional construct comprising a heterologous AAT nucleic acid. In some embodiments, disclosed herein are compositions useful for inducing a break (e.g., double-stranded break (DSB) or single-stranded break (SSB or nick)) within the albumin gene of a host cell, e.g., using an albumin guide RNA disclosed herein with an RNA-guided DNA binding agent (e.g., a CRISPR/Cas system). The compositions may be used in vitro or in vivo for, e.g., treating AATD.

[0115] In some embodiments, the albumin guide RNAs disclosed herein comprise a guide sequence that binds, or is capable of binding, within an intron of an albumin locus. In some embodiments, the albumin guide RNAs disclosed herein bind within a region of intron 1 of the human albumin gene of SEQ ID NO: 1. It will be appreciated that not every base of the albumin guide sequence must bind within the recited regions. For example, in some embodiments, 15, 16, 17, 18, 19, 20, or more, bases of the albumin guide RNA sequence bind within the recited regions. For example, in some embodiments, 15, 16, 17, 18, 19, 20, or more contiguous bases of the guide RNA sequence bind with the recited regions.

[0116] In some embodiments, the albumin guide RNAs disclosed herein mediate a target-specific cutting by an RNA-guided DNA binding agent (e.g., Cas nuclease) at a site within intron 1 of human albumin (SEQ ID NO: 1). It will be appreciated that, in some embodiments, the guide RNAs comprise guide sequences that bind to, or are capable of binding to, said regions.

[0117] In some embodiments, the albumin guide RNAs disclosed herein comprise a guide sequence that is at least 95% identical or 90% identical to a sequence selected from the group consisting of SEQ ID NOs: 2-33.

[0118] In some embodiments, the albumin guide RNAs disclosed herein comprise a guide sequence having at least 15, 16, 17, 18, 19, or 20 contiguous nucleotides of a sequence selected from the group consisting of SEQ ID NOs: 2-33.

[0119] In some embodiments, the albumin guide RNA (gRNA) comprises a guide sequence chosen from: a) a sequence that is at least 95%, 90%, 85%, 80%, or 75% identical to a sequence selected from the group consisting of SEQ ID NOs: 2, 8, 13, 19, 28, 29, 31, 32, 33; b) at least 17, 18, 19, or 20 contiguous nucleotides of a sequence selected from the group consisting of SEQ ID NOs: 2, 8, 13, 19, 28, 29, 31, 32, 33; c) a sequence selected from the group consisting of SEQ ID NOs: 34, 40, 45, 51, 60, 61, 63, 64, 65, 66, 72, 77, 83, 92, 93, 95, 96, and 97; d) a sequence that is at least 95%, 90%, 85%, 80%, or 75% identical to a sequence selected from the group consisting of SEQ ID NOs: 2-33; e) at least 17, 18, 19, or 20 contiguous nucleotides of a sequence selected from the group consisting of SEQ ID NOs: 2-33; f) a sequence selected from the group consisting of SEQ ID NOs: 34-97; and g) a sequence that is complementary to 15 consecutive nucleotides+/−5 nucleotides of the genomic coordinates listed for SEQ ID NOs: 2-33. In some embodiments, the albumin guide RNA comprises a sequence selected from the group consisting of SEQ ID NO: 2, 8, 13, 19, 28, 29, 31, 32, 33. See Table 1.

Human albumin intron 1:
(SEQ ID NO: 1)
GTAAGAAATCCATTTTTCTATTGTTCAACTTTTATTCTATTTTCCCAGTA
AAATAAAGTTTTAGTAAACTCTGCATCTTTAAAGAATTATTTTGGCATTT
ATTTCTAAAATGGCATAGTATTTTGTATTTGTGAAGTCTTACAAGGTTAT
CTTATTAATAAAATTCAAACATCCTAGGTAAAAAAAAAAAAAGGTCAGAA
TTGTTTAGTGACTGTAATTTTCTTTTGCGCACTAAGGAAAGTGCAAAGTA
ACTTAGAGTGACTGAAACTTCACAGAATAGGGTTGAAGATTGAATTCATA
ACTATCCCAAAGACCTATCCATTGCACTATGCTTTATTTAAAAACCACAA
AACCTGTGCTGTTGATCTCATAAATAGAACTTGTATTTATATTTATTTTC
ATTTTAGTCTGTCTTCTTGGTTGCTGTTGATAGACACTAAAAGAGTATTA
GATATTATCTAAGTTTGAATATAAGGCTATAAATATTTAATAATTTTTAA
AATAGTATTCTTGGTAATTGAATTATTCTTCTGTTTAAAGGCAGAAGAAA
TAATTGAACATCATCCTGAGTTTTTCTGTAGGAATCAGAGCCCAATATTT
TGAAACAAATGCATAATCTAAGTCAAATGGAAAGAAATATAAAAAGTAAC
ATTATTACTTCTTGTTTTCTTCAGTATTTAACAATCCTTTTTTTTCTTCC
CTTGCCCAG

TABLE 1
Albumin targeted human guide RNA sequences
and chromosomal coordinates

| | | | SEQ |
|---|---|---|---|
| Guide | | | ID |
| ID | Guide Sequence | Genomic Coordinates | NO: |
| G009844 | GAGCAACCUCACUCUUGUCU | chr4:73405113-73405133 | 2 |
| G009851 | AUGCAUUUGUUUCAAAAUAU | chr4:73405000-73405020 | 3 |
| G009852 | UGCAUUUGUUUCAAAAUAUU | chr4:73404999-73405019 | 4 |
| G009857 | AUUUAUGAGAUCAACAGCAC | chr4:73404761-73404781 | 5 |
| G009858 | GAUCAACAGCACAGGUUUUG | chr4:73404753-73404773 | 6 |
| G009859 | UUAAAUAAAGCAUAGUGCAA | chr4:73404727-73404747 | 7 |
| G009860 | UAAAGCAUAGUGCAAUGGAU | chr4:73404722-73404742 | 8 |
| G009861 | UAGUGCAAUGGAUAGGUCUU | chr4:73404715-73404735 | 9 |
| G009866 | UACUAAAACUUUAUUUUACU | chr4:73404452-73404472 | 10 |
| G009867 | AAAGUUGAACAAUAGAAAAA | chr4:73404418-73404438 | 11 |
| G009868 | AAUGCAUAAUCUAAGUCAAA | chr4:73405013-73405033 | 12 |
| G009874 | UAAUAAAAUUCAAACAUCCU | chr4:73404561-73404581 | 13 |
| G012747 | GCAUCUUUAAAGAAUUAUUU | chr4:73404478-73404498 | 14 |
| G012748 | UUUGGCAUUUAUUUCUAAAA | chr4:73404496-73404516 | 15 |
| G012749 | UGUAUUUGUGAAGUCUUACA | chr4:73404529-73404549 | 16 |
| G012750 | UCCUAGGUAAAAAAAAAAAA | chr4:73404577-73404597 | 17 |
| G012751 | UAAUUUUCUUUUGCGCACUA | chr4:73404620-73404640 | 18 |
| G012752 | UGACUGAAACUUCACAGAAU | chr4:73404664-73404684 | 19 |
| G012753 | GACUGAAACUUCACAGAAUA | chr4:73404665-73404685 | 20 |
| G012754 | UUCAUUUUAGUCUGUCUUCU | chr4:73404803-73404823 | 21 |
| G012755 | AUUAUCUAAGUUUGAAUAUA | chr4:73404859-73404879 | 22 |
| G012756 | AAUUUUUAAAAUAGUAUUCU | chr4:73404897-73404917 | 23 |
| G012757 | UGAAUUAUUCUUCUGUUUAA | chr4:73404924-73404944 | 24 |
| G012758 | AUCAUCCUGAGUUUUUCUGU | chr4:73404965-73404985 | 25 |
| G012759 | UUACUAAAACUUUAUUUUAC | chr4:73404453-73404473 | 26 |
| G012760 | ACCUUUUUUUUUUUUUACCU | chr4:73404581-73404601 | 27 |
| G012761 | AGUGCAAUGGAUAGGUCUUU | chr4:73404714-73404734 | 28 |
| G012762 | UGAUUCCUACAGAAAAACUC | chr4:73404973-73404993 | 29 |
| G012763 | UGGGCAAGGGAAGAAAAAAA | chr4:73405094-73405114 | 30 |
| G012764 | CCUCACUCUUGUCUGGGCAA | chr4:73405107-73405127 | 31 |
| G012765 | ACCUCACUCUUGUCUGGGCA | chr4:73405108-73405128 | 32 |
| G012766 | UGAGCAACCUCACUCUUGUC | chr4:73405114-73405134 | 33 |

[0120] The albumin guide RNAs disclosed herein mediate a target-specific cutting resulting in a double-stranded break (DSB). The albumin guide RNAs disclosed herein mediate a target-specific cutting resulting in a single-stranded break (SSB or nick).

[0121] In some embodiments, the albumin guide RNAs disclosed herein bind to a region upstream of a protospacer adjacent motif (PAM). As would be understood by those of skill in the art, the PAM sequence occurs on the strand opposite to the strand that contains the target sequence. That is, the PAM sequence is on the complement strand of the target strand (the strand that contains the target sequence to which the guide RNA binds). In some embodiments, the PAM is selected from the group consisting of NGG, NNGRRT, NNGRR(N), NNAGAAW, NNNNG(A/C)TT, and NNNNRYAC. In some embodiments, the PAM is NGG.

[0122] In some embodiments, the guide RNA sequences provided herein are complementary to a sequence adjacent to a PAM sequence.

[0123] In some embodiments, the guide RNA sequence comprises a sequence that is complementary to a sequence within a genomic region selected from the tables herein according to coordinates in human reference genome hg38. In some embodiments, the guide RNA sequence comprises a sequence that is complementary to a sequence that comprises 15, 16, 17, 18, 19, or 20 consecutive nucleotides from within a genomic region selected from the tables herein. In some embodiments, the guide RNA sequence comprises a sequence that is complementary to a sequence that comprises 15, 16, 17, 18, 19, or 20 consecutive nucleotides spanning a genomic region selected from the tables herein.

[0124] The guide RNAs disclosed herein mediate a target-specific cutting resulting in a double-stranded break (DSB). The guide RNAs disclosed herein mediate a target-specific cutting resulting in a single-stranded break (SSB or nick).

[0125] In some embodiments, the albumin guide RNAs disclosed herein mediates target-specific cutting by an RNA-guided DNA binding agent (e.g., a Cas nuclease, as disclosed herein), wherein a resultant cut site allows insertion of a heterologous AAT nucleic acid (e.g., a functional or wild-type AAT) within intron 1 of an albumin gene. In some embodiments, the guide RNA or cut site allows between 25 and 30%, 30 and 35%, 35 and 40%, 40 and 45%, 45 and 50%, 50 and 55%, 55 and 60%, 60 and 65%, 65 and 70%, 70 and 75%, 75 and 80%, 80 and 85%, 85 and 90%, 90 and 95% insertion of a heterologous AAT gene. In some embodiments, the guide RNA or cut site allows 25-90%, 25-80%, 25-70%, 25-50%, 35-80%, or 35-70% insertion of a heterologous AAT gene. In some embodiments, the guide RNA or cut site allows at least 25%, at least 30%, at least 40%, at least 50%, at least 60%, at least 70%, at least 80%, at least 90% insertion of a heterologous AAT nucleic acid. Insertion rates can be measured in vitro or in vivo. For example, in some embodiments, rate of insertion can be determined by detecting and measuring the inserted heterologous AAT nucleic acid within a population of cells, and calculating a percentage of the population that contains the inserted heterologous AAT nucleic acid. Methods of measuring insertion rates are known and available in the art. Such methods include, e.g., sequencing of the insertion site or sequencing mRNA isolated from a tissue or cell population of interest.

[0126] In some embodiments, the guide RNA allows between 50 and 55%, 55 and 60%, 60 and 65%, 65 and 70%, 70 and 75%, 75 and 80%, 80 and 85%, 85 and 90%, 90 and 95%, 95 and 99% or more increased expression or secretion of a heterologous AAT gene. In some embodiments, the RNA allows at least 50%, 60%, 70%, 80%, 90% or 100% of the lower limit of normal of AAT expression. In certain embodiments, the level expressed is a combination of endogenous protein and heterologous protein. For example, in some embodiments, increased expression or secretion can be determined by detecting and measuring the AAT polypeptide level and comparing the level against the AAT polypeptide level before, e.g., treating the cells or administration to a subject. Increased expression or secretion of a heterologous AAT gene can be measured in vitro or in vivo. In some embodiments, secretion or expression of AAT is measured either by detecting protein secreted by tissue or population of cells (e.g., in serum or cell media) or by detecting total cellular amount of the protein from a tissue or cell population of interest, using, e.g., an enzyme-linked immunosorbent assay (ELISA), HPLC, mass spectrometry (e.g., liquid mass spectrometry (e.g., LC-MS, LC-MS/MS), or western blot assay with culture media or cell or tissue (e.g., liver) extract. In some embodiments, secretion or expression of AAT is measured in primary human hepatocytes, e.g. media or cellular samples. In some embodiments, secretion of AAT is measured in HUH7 cells, e.g. media samples. In some embodiments, the cell used is HUH7 cells. In some embodiments, the amount of AAT is compared to the amount of glyceraldehyde 3-phosphate dehydrogenase GAPDH (a housekeeping gene) to control for changes in cell number. In some embodiments, AAT may be assessed by PASD staining of liver tissue sections, e.g., to measure aggregation. In some embodiments, AAT may be assessed by measuring inhibition of neutrophil elastase, e.g., in the lung.

[0127] In some embodiments, the guide RNA allows between 50 and 55%, 55 and 60%, 60 and 65%, 65 and 70%, 70 and 75%, 75 and 80%, 80 and 85%, 85 and 90%, 90 and 95%, 95 and 99% or more increased activity that results from expression of a heterologous AAT gene (e.g., a functional or wild-type AAT). In some embodiments, the guide RNA allows at least 50%, 60%, 70%, 80%, 90% or 100% activity level of the lower limit of normal of AAT in a subject not suffering from AATD. In certain embodiments, the activity is a combination of endogenous protein and heterologous protein. For example, increased activity can be determined by detecting and measuring the protease inhibitor activity level and comparing the level against a level of activity before, e.g., treating the cells or administration to a subject. Such methods are available and known in the art. See, e.g., Mullins et al., “Standardized automated assay for functional alpha 1-antitrypsin,” 1984; Eckfeldt et al., “Automated assay for alpha-1-antitiypsin with N-a-benzoyl-DL-arginine-p-nitroanilide astrypsin substrate and standardized with p-nitrophenyl-p′-guanidinobenzoateastitrant fortrypsinactivesites,” 1982.

[0128] In some embodiments, the target sequence or region within intron 1 of a human albumin locus (of SEQ ID NO: 1) may be complementary to the guide sequence of the albumin guide RNA. In some embodiments, the degree of complementarity or identity between a guide sequence of a guide RNA and its corresponding target sequence may be at least 80%, 85%, 90%, or 95%; or 100%. In some embodiments, the target sequence and the guide sequence of the gRNA may be 100% complementary or identical. In other embodiments, the target sequence and the guide sequence of the gRNA may contain at least one mismatch. For example, the target sequence and the guide sequence of the gRNA may contain 1, 2, 3, or 4 mismatches, where the total length of the guide sequence is about 20, or 20. In some embodiments, the target sequence and the guide sequence of the gRNA may contain 1-4 mismatches where the guide sequence is about 20, or 20 nucleotides.

[0129] As described and exemplified herein, the albumin guide RNAs can be used to insert and express a heterologous AAT gene (e.g., a functional or wild-type AAT) at intron 1 of an albumin gene, in combination with a SERPINA1 guide RNA to knockdown or knockout an endogenous SERPINA1 gene (e.g., a mutant SERPINA1 gene). Thus, in some embodiments, the present disclosure includes compositions comprising one or more SERPINA1 guide RNA (gRNA) comprising guide sequences that direct an RNA-guided DNA binding agent (e.g., Cas9) to a target DNA sequence in SERPINA1. The gRNA may comprise one or more of the guide sequences shown in Table 2. In some embodiments, provided herein are one or more SERPINA1 guide RNAs comprising a guide sequence of any one of SEQ ID NOs: 1000-1131.

[0130] In one aspect, the disclosure provides a SERPINA1 gRNA that comprises a guide sequence that is at least 95% identical or 90% identical to a sequence selected from SEQ ID NOs: 1000-1131.

[0131] In other embodiments, the composition comprises at least two SERPINA1 gRNA's comprising guide sequences selected from any two or more of the guide sequences of SEQ ID NOs: 1000-1131. In some embodiments, the composition comprises at least two gRNA's that each are at least 95% identical or 90%, identical to any of the nucleic acids of SEQ ID NOs: 1000-1131.

[0132] The SERPINA1 guide RNA compositions provided herein are designed to recognize a target sequence in the SERPINA1 gene. For example, the SERPINA1 target sequence may be recognized and cleaved by the provided RNA-guided DNA binding agent. In some embodiments, a Cas protein may be directed by a SERPINA1 guide RNA to a target sequence of the SERPINA1 gene, where the guide sequence of the guide RNA hybridizes with the target sequence and the Cas protein cleaves the target sequence.

[0133] In some embodiments, the selection of the one or more SERPINA1 guide RNAs is determined based on target sequences within the SERPINA1 gene.

[0134] Without being bound by any particular theory, mutations in critical regions of the gene may be less tolerable than mutations in non-critical regions of the gene, thus the location of a DSB is an important factor in the amount or type of protein knockdown or knockout that may result. In some embodiments, a SERPINA1 gRNA complementary or having complementarity to a target sequence within SERPINA1 is used to direct the Cas protein to a particular location in the SERPINA1 gene. In some embodiments, SERPINA1 gRNAs are designed to have guide sequences that are complementary or have complementarity to target sequences in exons 2, 3, 4, or 5 of SERPINA1.

[0135] In some embodiments, SERPINA1 gRNAs are designed to be complementary or have complementarity to target sequences in exons of SERPINA1 that code for the N-terminal region of AAT.

TABLE 2
SERPINA1 targeted and control guide sequence nomenclature, chromosomal
coordinates, and sequence

| SEQ | | | | |
|---|---|---|---|---|
| ID | | | Human Chromosomal | |
| No | Guide ID | Description | coordinates (hg38) | Guide Sequences |
| 1000 | CR001261 | Control 1 | Chr1:55039269- | GCCAGACUCCAAGUUCUGCC |
| | | | 55039291 | |
| 1001 | CR001262 | Control 2 | Chr1:55039155- | UAAGGCCAGUGGAAAGAAUU |
| | | | 55039177 | |
| 1002 | CR001263 | Control 3 | Chr1:55039180- | GGCAGCGAGGAGUCCACAGU |
| | | | 55039202 | |
| 1003 | CR001264 | Control 4 | Chr1:55039149- | UCUUUCCACUGGCCUUAACC |
| | | | 55039171 | |
| 1004 | CR001367 | Exon 2 | Chr14:94383211- | CAAUGCCGUCUUCUGUCUCG |
| | | | 94383233 | |
| 1005 | CR001368 | Exon 2 | Chr14:94383210- | AAUGCCGUCUUCUGUCUCGU |
| | | | 94383232 | |
| 1006 | CR001369 | Exon 2 | Chr14:94383209- | AUGCCGUCUUCUGUCUCGUG |
| | | | 94383231 | |
| 1007 | CR001370 | Exon 2 | Chr14:94383206- | AUGCCCCACGAGACAGAAGA |
| | | | 94383228 | |
| 1008 | CR001371 | Exon 2 | Chr14:94383195- | CUCGUGGGGCAUCCUCCUGC |
| | | | 94383217 | |
| 1009 | CR001372 | Exon 2 | Chr14:94383152- | GGAUCCUCAGCCAGGGAGAC |
| | | | 94383174 | |
| 1010 | CR001373 | Exon 2 | Chr14:94383146- | UCCCUGGCUGAGGAUCCCCA |
| | | | 94383168 | |
| 1011 | CR001374 | Exon 2 | Chr14:94383145- | UCCCUGGGGAUCCUCAGCCA |
| | | | 94383167 | |
| 1012 | CR001375 | Exon 2 | Chr14:94383144- | CUCCCUGGGGAUCCUCAGCC |
| | | | 94383166 | |
| 1013 | CR001376 | Exon 2 | Chr14:94383115- | GUGGGAUGUAUCUGUCUUCU |
| | | | 94383137 | |
| 1014 | CR001377 | Exon 2 | Chr14:94383114- | GGUGGGAUGUAUCUGUCUUC |
| | | | 94383136 | |
| 1015 | CR001378 | Exon 2 | Chr14:94383105- | AGAUACAUCCCACCAUGAUC |
| | | | 94383127 | |
| 1016 | CR001379 | Exon 2 | Chr14:94383097- | UGGGUGAUCCUGAUCAUGGU |
| | | | 94383119 | |
| 1017 | CR001380 | Exon 2 | Chr14:94383096- | UUGGGUGAUCCUGAUCAUGG |
| | | | 94383118 | |
| 1018 | CR001381 | Exon 2 | Chr14:94383093- | AGGUUGGGUGAUCCUGAUCA |
| | | | 94383115 | |
| 1019 | CR001382 | Exon 2 | Chr14:94383078- | GGGUGAUCUUGUUGAAGGUU |
| | | | 94383100 | |
| 1020 | CR001383 | Exon 2 | Chr14:94383077- | GGGGUGAUCUUGUUGAAGGU |
| | | | 94383099 | |
| 1021 | CR001384 | Exon 2 | Chr14:94383069- | CAACAAGAUCACCCCCAACC |
| | | | 94383091 | |
| 1022 | CR001385 | Exon 2 | Chr14:94383057- | AGGCGAACUCAGCCAGGUUG |
| | | | 94383079 | |
| 1023 | CR001386 | Exon 2 | Chr14:94383055- | GAAGGCGAACUCAGCCAGGU |
| | | | 94383077 | |
| 1024 | CR001387 | Exon 2 | Chr14:94383051- | GGCUGAAGGCGAACUCAGCC |
| | | | 94383073 | |
| 1025 | CR001388 | Exon 2 | Chr14:94383037- | CAGCUGGCGGUAUAGGCUGA |
| | | | 94383059 | |
| 1026 | CR001389 | Exon 2 | Chr14:94383036- | CUUCAGCCUAUACCGCCAGC |
| | | | 94383058 | |
| 1027 | CR001390 | Exon 2 | Chr14:94383030- | GGUGUGCCAGCUGGCGGUAU |
| | | | 94383052 | |
| 1028 | CR001391 | Exon 2 | Chr14:94383021- | UGUUGGACUGGUGUGCCAGC |
| | | | 94383043 | |
| 1029 | CR001392 | Exon 2 | Chr14:94383009- | AGAUAUUGGUGCUGUUGGAC |
| | | | 94383031 | |
| 1030 | CR001393 | Exon 2 | Chr14:94383004- | GAAGAAGAUAUUGGUGCUGU |
| | | | 94383026 | |
| 1031 | CR001394 | Exon 2 | Chr14:94382995- | CACUGGGGAGAAGAAGAUAU |
| | | | 94383017 | |
| 1032 | CR001395 | Exon 2 | Chr14:94382980- | GGCUGUAGCGAUGCUCACUG |
| | | | 94383002 | |
| 1033 | CR001396 | Exon 2 | Chr14:94382979- | AGGCUGUAGCGAUGCUCACU |
| | | | 94383001 | |
| 1034 | CR001397 | Exon 2 | Chr14:94382978- | AAGGCUGUAGCGAUGCUCAC |
| | | | 94383000 | |
| 1035 | CR001398 | Exon 2 | Chr14:94382928- | UGACACUCACGAUGAAAUCC |
| | | | 94382950 | |
| 1036 | CR001399 | Exon 2 | Chr14:94382925- | CACUCACGAUGAAAUCCUGG |
| | | | 94382947 | |
| 1037 | CR001400 | Exon 2 | Chr14:94382924- | ACUCACGAUGAAAUCCUGGA |
| | | | 94382946 | |
| 1038 | CR001401 | Exon 2 | Chr14:94382910- | GGUUGAAAUUCAGGCCCUCC |
| | | | 94382932 | |
| 1039 | CR001402 | Exon 2 | Chr14:94382904- | GGGCCUGAAUUUCAACCUCA |
| | | | 94382926 | |
| 1040 | CR001403 | Exon 2 | Chr14:94382895- | UUUCAACCUCACGGAGAUUC |
| | | | 94382917 | |
| 1041 | CR001404 | Exon 2 | Chr14:94382892- | CAACCUCACGGAGAUUCCGG |
| | | | 94382914 | |
| 1042 | CR001405 | Exon 2 | Chr14:94382889- | GAGCCUCCGGAAUCUCCGUG |
| | | | 94382911 | |
| 1043 | CR001406 | Exon 2 | Chr14:94382876- | CCGGAGGCUCAGAUCCAUGA |
| | | | 94382898 | |
| 1044 | CR001407 | Exon 2 | Chr14:94382850- | UGAGGGUACGGAGGAGUUCC |
| | | | 94382872 | |
| 1045 | CR001408 | Exon 2 | Chr14:94382841- | CUGGCUGGUUGAGGGUACGG |
| | | | 94382863 | |
| 1046 | CR001409 | Exon 2 | Chr14:94382833- | CUGGCUGUCUGGCUGGUUGA |
| | | | 94382855 | |
| 1047 | CR001410 | Exon 2 | Chr14:94382810- | CUCCAGCUGACCACCGGCAA |
| | | | 94382832 | |
| 1048 | CR001411 | Exon 2 | Chr14:94382808- | GGCCAUUGCCGGUGGUCAGC |
| | | | 94382830 | |
| 1049 | CR001412 | Exon 2 | Chr14:94382800- | GAGGAACAGGCCAUUGCCGG |
| | | | 94382822 | |
| 1050 | CR001413 | Exon 2 | Chr14:94382797- | GCUGAGGAACAGGCCAUUGC |
| | | | 94382819 | |
| 1051 | CR001414 | Exon 2 | Chr14:94382793- | CAAUGGCCUGUUCCUCAGCG |
| | | | 94382815 | |
| 1052 | CR001415 | Exon 2 | Chr14:94382792- | AAUGGCCUGUUCCUCAGCGA |
| | | | 94382814 | |
| 1053 | CR001416 | Exon 2 | Chr14:94382787- | UCAGGCCCUCGCUGAGGAAC |
| | | | 94382809 | |
| 1054 | CR001417 | Exon 2 | Chr14:94382781- | CUAGCUUCAGGCCCUCGCUG |
| | | | 94382803 | |
| 1055 | CR001418 | Exon 2 | Chr14:94382778- | CAGCGAGGGCCUGAAGCUAG |
| | | | 94382800 | |
| 1056 | CR001419 | Exon 2 | Chr14:94382769- | AAAACUUAUCCACUAGCUUC |
| | | | 94382791 | |
| 1057 | CR001420 | Exon 2 | Chr14:94382766- | GAAGCUAGUGGAUAAGUUUU |
| | | | 94382788 | |
| 1058 | CR001421 | Exon 2 | Chr14:94382763- | GCUAGUGGAUAAGUUUUUGG |
| | | | 94382785 | |
| 1059 | CR001422 | Exon 2 | Chr14:94382724- | UGACAGUGAAGGCUUCUGAG |
| | | | 94382746 | |
| 1060 | CR001423 | Exon 2 | Chr14:94382716- | AAGCCUUCACUGUCAACUUC |
| | | | 94382738 | |
| 1061 | CR001424 | Exon 2 | Chr14:94382715- | AGCCUUCACUGUCAACUUCG |
| | | | 94382737 | |
| 1062 | CR001425 | Exon 2 | Chr14:94382713- | GUCCCCGAAGUUGACAGUGA |
| | | | 94382735 | |
| 1063 | CR001426 | Exon 2 | Chr14:94382703- | CAACUUCGGGGACACCGAAG |
| | | | 94382725 | |
| 1064 | CR001427 | Exon 2 | Chr14:94382689- | GAUCUGUUUCUUGGCCUCUU |
| | | | 94382711 | |
| 1065 | CR001428 | Exon 2 | Chr14:94382680- | GUAAUCGUUGAUCUGUUUCU |
| | | | 94382702 | |
| 1066 | CR001429 | Exon 2 | Chr14:94382676- | GAAACAGAUCAACGAUUACG |
| | | | 94382698 | |
| 1067 | CR001430 | Exon 2 | Chr14:94382670- | GAUCAACGAUUACGUGGAGA |
| | | | 94382692 | |
| 1068 | CR001431 | Exon 2 | Chr14:94382669- | AUCAACGAUUACGUGGAGAA |
| | | | 94382691 | |
| 1069 | CR001432 | Exon 2 | Chr14:94382660- | UACGUGGAGAAGGGUACUCA |
| | | | 94382682 | |
| 1070 | CR001433 | Exon 2 | Chr14:94382659- | ACGUGGAGAAGGGUACUCAA |
| | | | 94382681 | |
| 1071 | CR001434 | Exon 2 | Chr14:94382643- | UCAAGGGAAAAUUGUGGAUU |
| | | | 94382665 | |
| 1072 | CR001435 | Exon 2 | Chr14:94382637- | GAAAAUUGUGGAUUUGGUCA |
| | | | 94382659 | |
| 1073 | CR001436 | Exon 2 | Chr14:94382607- | CAGAGACACAGUUUUUGCUC |
| | | | 94382629 | |
| 1074 | CR001437 | Exon 3 | Chr14:94381127- | UCCCCUCUCUCCAGGCAAAU |
| | | | 94381149 | |
| 1075 | CR001438 | Exon 3 | Chr14:94381098- | CUCGGUGUCCUUGACUUCAA |
| | | | 94381120 | |
| 1076 | CR001439 | Exon 3 | Chr14:94381097- | CUUUGAAGUCAAGGACACCG |
| | | | 94381119 | |
| 1077 | CR001440 | Exon 3 | Chr14:94381080- | CACGUGGAAGUCCUCUUCCU |
| | | | 94381102 | |
| 1078 | CR001441 | Exon 3 | Chr14:94381079- | CGAGGAAGAGGACUUCCACG |
| | | | 94381101 | |
| 1079 | CR001442 | Exon 3 | Chr14:94381073- | AGAGGACUUCCACGUGGACC |
| | | | 94381095 | |
| 1080 | CR001443 | Exon 3 | Chr14:94381064- | CGGUGGUCACCUGGUCCACG |
| | | | 94381086 | |
| 1081 | CR001444 | Exon 3 | Chr14:94381058- | GGACCAGGUGACCACCGUGA |
| | | | 94381080 | |
| 1082 | CR001445 | Exon 3 | Chr14:94381055- | GCACCUUCACGGUGGUCACC |
| | | | 94381077 | |
| 1083 | CR001446 | Exon 3 | Chr14:94381047- | CAUCAUAGGCACCUUCACGG |
| | | | 94381069 | |
| 1084 | CR001447 | Exon 3 | Chr14:94381036- | GUGCCUAUGAUGAAGCGUUU |
| | | | 94381058 | |
| 1085 | CR001448 | Exon 3 | Chr14:94381033- | AUGCCUAAACGCUUCAUCAU |
| | | | 94381055 | |
| 1086 | CR001449 | Exon 3 | Chr14:94381001- | UGGACAGCUUCUUACAGUGC |
| | | | 94381023 | |
| 1087 | CR001450 | Exon 3 | Chr14:94380995- | CUGUAAGAAGCUGUCCAGCU |
| | | | 94381017 | |
| 1088 | CR001451 | Exon 3 | Chr14:94380974- | GGUGCUGCUGAUGAAAUACC |
| | | | 94380996 | |
| 1089 | CR001452 | Exon 3 | Chr14:94380973- | GUGCUGCUGAUGAAAUACCU |
| | | | 94380995 | |
| 1090 | CR001453 | Exon 3 | Chr14:94380956- | AGAUGGCGGUGGCAUUGCCC |
| | | | 94380978 | |
| 1091 | CR001454 | Exon 3 | Chr14:94380945- | AGGCAGGAAGAAGAUGGCGG |
| | | | 94380967 | |
| 1092 | CR001474 | Exon 5 | Chr14:94378611- | GGUCAGCACAGCCUUAUGCA |
| | | | 94378633 | |
| 1093 | CR001475 | Exon 5 | Chr14:94378581- | AGAAAGGGACUGAAGCUGCU |
| | | | 94378603 | |
| 1094 | CR001476 | Exon 5 | Chr14:94378580- | GAAAGGGACUGAAGCUGCUG |
| | | | 94378602 | |
| 1095 | CR001477 | Exon 5 | Chr14:94378565- | UGCUGGGGCCAUGUUUUUAG |
| | | | 94378587 | |
| 1096 | CR001478 | Exon 5 | Chr14:94378557- | GGGUAUGGCCUCUAAAAACA |
| | | | 94378579 | |
| 1097 | CR001483 | Exon 5 | Chr14:94378526- | UGUUGAACUUGACCUCGGGG |
| | | | 94378548 | |
| 1098 | CR001484 | Exon 5 | Chr14:94378521- | GGGUUUGUUGAACUUGACCU |
| | | | 94378543 | |
| 1099 | CR003190 | Exon 2 | Chr14:94383131- | UUCUGGGCAGCAUCUCCCUG |
| | | | 94383153 | |
| 1100 | CR003191 | Exon 2 | Chr14:94383129- | UCUUCUGGGCAGCAUCUCCC |
| | | | 94383151 | |
| 1101 | CR003196 | Exon 2 | Chr14:94383024- | UGGACUGGUGUGCCAGCUGG |
| | | | 94383046 | |
| 1102 | CR003204 | Exon 2 | Chr14:94382961- | AGCCUUUGCAAUGCUCUCCC |
| | | | 94382983 | |
| 1103 | CR003205 | Exon 2 | Chr14:94382935- | UUCAUCGUGAGUGUCAGCCU |
| | | | 94382957 | |
| 1104 | CR003206 | Exon 2 | Chr14:94382901- | UCUCCGUGAGGUUGAAAUUC |
| | | | 94382923 | |
| 1105 | CR003207 | Exon 2 | Chr14:94382822- | GUCAGCUGGAGCUGGCUGUC |
| | | | 94382844 | |
| 1106 | CR003208 | Exon 2 | Chr14:94382816- | AGCCAGCUCCAGCUGACCAC |
| | | | 94382838 | |
| 1107 | CR003217 | Exon 3 | Chr14:94380942- | AUCAGGCAGGAAGAAGAUGG |
| | | | 94380964 | |
| 1108 | CR003218 | Exon 3 | Chr14:94380938- | CAUCUUCUUCCUGCCUGAUG |
| | | | 94380960 | |
| 1109 | CR003219 | Exon 3 | Chr14:94380937- | AUCUUCUUCCUGCCUGAUGA |
| | | | 94380959 | |
| 1110 | CR003220 | Exon 3 | Chr14:94380881- | CGAUAUCAUCACCAAGUUCC |
| | | | 94380903 | |
| 1111 | CR003221 | Exon 4 | Chr14:94379554- | CAGAUCAUAGGUUCCAGUAA |
| | | | 94379576 | |
| 1112 | CR003222 | Exon 4 | Chr14:94379507- | AUCACUAAGGUCUUCAGCAA |
| | | | 94379529 | |
| 1113 | CR003223 | Exon 4 | Chr14:94379506- | UCACUAAGGUCUUCAGCAAU |
| | | | 94379528 | |
| 1114 | CR003224 | Exon 4 | Chr14:94379505- | CACUAAGGUCUUCAGCAAUG |
| | | | 94379527 | |
| 1115 | CR003225 | Exon 4 | Chr14:94379453- | CUCACCUUGGAGAGCUUCAG |
| | | | 94379475 | |
| 1116 | CR003226 | Exon 4 | Chr14:94379452- | UCUCACCUUGGAGAGCUUCA |
| | | | 94379474 | |
| 1117 | CR003227 | Exon 4 | Chr14:94379451- | AUCUCACCUUGGAGAGCUUC |
| | | | 94379473 | |
| 1118 | CR003235 | Exon 5 | Chr14:94378525- | UUGUUGAACUUGACCUCGGG |
| | | | 94378547 | |
| 1119 | CR003236 | Exon 5 | Chr14:94378524- | UUUGUUGAACUUGACCUCGG |
| | | | 94378546 | |
| 1120 | CR003237 | Exon 5 | Chr14:94378523- | GUUUGUUGAACUUGACCUCG |
| | | | 94378545 | |
| 1121 | CR003238 | Exon 5 | Chr14:94378522- | GGUUUGUUGAACUUGACCUC |
| | | | 94378544 | |
| 1122 | CR003240 | Exon 5 | Chr14:94378501- | UCAAUCAUUAAGAAGACAAA |
| | | | 94378523 | |
| 1123 | CR003241 | Exon 5 | Chr14:94378500- | UUCAAUCAUUAAGAAGACAA |
| | | | 94378522 | |
| 1124 | CR003242 | Exon 5 | Chr14:94378472- | UACCAAGUCUCCCCUCUUCA |
| | | | 94378494 | |
| 1125 | CR003243 | Exon 5 | Chr14:94378471- | ACCAAGUCUCCCCUCUUCAU |
| | | | 94378493 | |
| 1126 | CR003244 | Exon 5 | Chr14:94378463- | UCCCCUCUUCAUGGGAAAAG |
| | | | 94378485 | |
| 1127 | CR003245 | Exon 5 | Chr14:94378461- | CACCACUUUUCCCAUGAAGA |
| | | | 94378483 | |
| 1128 | CR003246 | Exon 5 | Chr14:94378460- | UCACCACUUUUCCCAUGAAG |
| | | | 94378482 | |
| 1129 | GR000409 | Exon 2 | chr14:94382932- | ACUCACGAUGAAAUCCUGGA |
| | | | 94382952 | |
| 1130 | GR000414 | Exon 2 | chr14:94382900- | CAACCUCACGGAGAUUCCGG |
| | | | 94382920 | |
| 1131 | GR000415 | Exon 2 | chr14:94383026- | UGUUGGACUGGUGUGCCAGC |
| | | | 94383046 | |

[0136] Each of the albumin guide sequences and SERPINA1 guide sequences described herein may further comprise additional nucleotides to form a crRNA or guide RNA, e.g., with the following exemplary nucleotide sequence following the guide sequence at its 3′ end: GUUUUAGAGCUAUGCUGUUUUG (SEQ ID NO: 900) in 5′ to 3′ orientation. In the case of a sgRNA, the above guide sequences (the albumin guide sequences and SERPINA1 guide sequences shown in Table 1 at SEQ ID NOs:2-33 and Table 2 at SEQ ID Nos: 1000-1131, respectively) may further comprise additional nucleotides to form a sgRNA, e.g., with the following exemplary nucleotide sequence following the 3′ end of the guide sequence: GUUUUAGAGCUAGAAAUAGCAAGUUAAAAUAAGGCUAGUCCGUUAUCAACUU GAAAAAGUGGCACCGAGUCGGUGCUUUU (SEQ ID NO: 901) in 5′ to 3′ orientation.

[0137] In the case of a sgRNA, the guide sequences may be integrated into the following modified motif: 15 mAmGmCAAGUUAAAAUAAGGCUAGUCCGUUAUCAmAmCmUmUmGmAmAmAm AmAmGmUmGmGmCmAmCmCmGmAmGmUmCmGmGmUmGmCmU*mU*mU*mU (SEQ ID NO: 300), where “N” may be any natural or non-natural nucleotide, preferably an RNA nucleotide; sugar moieties of the nucleotide can be ribose, deoxyribose, or similar compounds with substitutions; m is a 2′-O-methyl modified nucleotide, and * is a phosphorothioate linkage between nucleotide residues; and wherein the N's are collectively the nucleotide sequence of a guide sequence.

[0138] In the case of a sgRNA, the guide sequences may further comprise a SpyCas9 sgRNA sequence. An example of a SpyCas9 sgRNA sequence is shown below (SEQ ID NO: 902: GUUUUAGAGCUAGAAAUAGCAAGUUAAAAUAAGGCUAGUCCGUUAUCAACUU GAAAAAGUGGCACCGAGUCGGUGC—“Exemplary SpyCas9 sgRNA-1”), included at the 3′ end of the guide sequence, and provided with the domains as shown in the table below. LS is lower stem. B is bulge. US is upper stem. H1 and H2 are hairpin 1 and hairpin 2, respectively. Collectively H1 and H2 are referred to as the hairpin region. A model of the structure is provided in FIG. 10A of WO2019237069 which is incorporated herein by reference.

[0139] The nucleotide sequence of Exemplary SpyCas9 sgRNA-1 may serve as a template sequence for specific chemical modifications, sequence substitutions and truncations. In certain embodiments, the gRNA is an sgRNA or a dgRNA, for example, and it optionally comprises a chemical modification. In some embodiments, the modified sgRNA comprises a guide sequence and a SpyCas9 sgRNA sequence, e.g., Exemplary SpyCas9 sgRNA-1. A gRNA, such as an sgRNA, may include modifications on the 5′ end of the guide sequence and/or on the 3′ end of the SpyCas9 sgRNA sequence, such as, e.g., Exemplary SpyCas9 sgRNA-1 at one or more of the terminal nucleotides, e.g., at 1, 2, 3, or 4 of the nucleotides at the 3′ end or at the 5′ end. In certain embodiments, the modified nucleotide is selected from a 2′-O-methyl (2′-OMe) modified nucleotide, a 2′-O-(2-methoxyethyl) (2′-O-moe) modified nucleotide, a 2′-fluoro (2′-F) modified nucleotide, a phosphorothioate (PS) linkage between nucleotides, an inverted abasic modified nucleotide, or a combination thereof. In certain embodiments, the modified nucleotide includes a 2′-OMe modified nucleotide. In certain embodiments, the modified nucleotide includes a PS linkage. In certain embodiments, the modified nucleotide includes a 2′-OMe modified nucleotide and a PS linkage.

[0140] In certain embodiments, using SEQ ID NO: 201 (“Exemplary SpyCas9 sgRNA-1”) as an example, the Exemplary SpyCas9 sgRNA-1 further includes one or more of:
[0141] A. a shortened hairpin 1 region, or a substituted and optionally shortened hairpin 1 region, wherein
   [0142] 1. at least one of the following pairs of nucleotides are substituted in hairpin 1 with Watson-Crick pairing nucleotides: H1-1 and H1-12, H1-2 and H1-11, H1-3 and H1-10, or H1-4 and H1-9, and the hairpin 1 region optionally lacks
      [0143] a. any one or two of H1-5 through H1-8,
      [0144] b. one, two, or three of the following pairs of nucleotides: H1-1 and H1-12, H1-2 and H1-11, H1-3 and H1-10, and H1-4 and H1-9, or
      [0145] c. 1-8 nucleotides of hairpin 1 region; or
   [0146] 2. the shortened hairpin 1 region lacks 4-8 nucleotides, preferably 4-6 nucleotides; and
      [0147] a. one or more of positions H1-1, H1-2, or H1-3 is deleted or substituted relative to Exemplary SpyCas9 sgRNA-1 (SEQ ID NO: 201) or
      [0148] b. one or more of positions H1-6 through H1-10 is substituted relative to Exemplary SpyCas9 sgRNA-1 (SEQ ID NO: 902); or
   [0149] 3. the shortened hairpin 1 region lacks 5-10 nucleotides, preferably 5-6 nucleotides, and one or more of positions N18, H1-12, or n is substituted relative to Exemplary SpyCas9 sgRNA-1 (SEQ ID NO: 902); or
[0150] B. a shortened upper stem region, wherein the shortened upper stem region lacks 1-6 nucleotides and wherein the 6, 7, 8, 9, 10, or 11 nucleotides of the shortened upper stem region include less than or equal to 4 substitutions relative to Exemplary SpyCas9 sgRNA-1 (SEQ ID NO: 201); or
[0151] C. a substitution relative to Exemplary SpyCas9 sgRNA-1 (SEQ ID NO: 902) at any one or more of LS6, LS7, US3, US10, B3, N7, N15, N17, H2-2 and H2-14, wherein the substituent nucleotide is neither a pyrimidine that is followed by an adenine, nor an adenine that is preceded by a pyrimidine; or
[0152] D. an Exemplary SpyCas9 sgRNA-1 (SEQ ID NO: 902) with an upper stem region, wherein the upper stem modification comprises a modification to any one or more of US1-US12 in the upper stem region, wherein
   [0153] 1. the modified nucleotide is optionally selected from a 2′-O-methyl (2′-OMe) modified nucleotide, a 2′-O-(2-methoxyethyl) (2′-O-moe) modified nucleotide, a 2′-fluoro (2′-F) modified nucleotide, a phosphorothioate (PS) linkage between nucleotides, an inverted abasic modified nucleotide, or a combination thereof; or
   [0154] 2. the modified nucleotide optionally includes a 2′-OMe modified.

[0155] In certain embodiments, Exemplary SpyCas9 sgRNA-1, or an sgRNA, such as an sgRNA comprising an Exemplary SpyCas9 sgRNA-1, further includes a 3′ tail, e.g., a 3′ tail of 1, 2, 3, 4, or more nucleotides. In certain embodiments, the tail includes one or more modified nucleotides. In certain embodiments, the modified nucleotide is selected from a 2′-O-methyl (2′-OMe) modified nucleotide, a 2′-O-(2-methoxyethyl) (2′-O-moe) modified nucleotide, a 2′-fluoro (2′-F) modified nucleotide, a phosphorothioate (PS) linkage between nucleotides, an inverted abasic modified nucleotide; or a combination thereof. In certain embodiments, the modified nucleotide includes a 2′-OMe modified nucleotide. In certain embodiments, the modified nucleotide includes a PS linkage between nucleotides. In certain embodiments, the modified nucleotide includes a 2′-OMe modified nucleotide and a PS linkage between nucleotides.

[0156] In certain embodiments, the hairpin region includes one or more modified nucleotides. In certain embodiments, the modified nucleotide is selected from a 2′-O-methyl (2′-OMe) modified nucleotide, a 2′-O-(2-methoxyethyl) (2′-O-moe) modified nucleotide, a 2′-fluoro (2′-F) modified nucleotide, a phosphorothioate (PS) linkage between nucleotides, an inverted abasic modified nucleotide; or a combination thereof. In certain embodiments, the modified nucleotide includes a 2′-OMe modified nucleotide.

[0157] In certain embodiments, the upper stem region includes one or more modified nucleotides. In certain embodiments, the modified nucleotide selected from a 2′-O-methyl (2′-OMe) modified nucleotide, a 2′-O-(2-methoxyethyl) (2′-O-moe) modified nucleotide, a 2′-fluoro (2′-F) modified nucleotide, a phosphorothioate (PS) linkage between nucleotides, an inverted abasic modified nucleotide; or a combination thereof. In certain embodiments, the modified nucleotide includes a 2′-OMe modified nucleotide.

[0158] In certain embodiments, the Exemplary SpyCas9 sgRNA-1 comprises one or more YA dinucleotides, wherein Y is a pyrimidine, wherein the YA dinucleotide includes a modified nucleotide. In certain embodiments, the modified nucleotide selected from a 2′-O-methyl (2′-OMe) modified nucleotide, a 2′-O-(2-methoxyethyl) (2′-O-moe) modified nucleotide, a 2′-fluoro (2′-F) modified nucleotide, a phosphorothioate (PS) linkage between nucleotides, an inverted abasic modified nucleotide, or a combination thereof. In certain embodiments, the modified nucleotide includes a 2′-OMe modified nucleotide.

[0159] In certain embodiments, the Exemplary SpyCas9 sgRNA-1 comprises one or more YA dinucleotides, wherein Y is a pyrimidine, wherein the YA dinucleotide includes a substituted nucleotide, i.e., sequence substituted nucleotide, wherein the pyrimidine is substituted for a purine. In certain embodiments, when the pyrimidine forms a Watson-Crick base pair in the single guide, the Watson-Crick based nucleotide of the substituted pyrimidine nucleotide is substituted to maintain Watson-Crick base pairing.

Exemplary spyCas9 sgRNA-1 (SEQ ID NO: 902)

| 1 | 2 | 3 | 4 | 5 | 6 | 7 | 8 | 9 | 10 | 11 | 12 | 13 | 14 | 15 | 16 | 17 | 18 | 19 | 20 | 21 | 22 | 23 | 24 | 25 | 26 | 27 | 28 | 29 | 30 |
|---|---|---|---|---|---|---|---|---|---|---|---|---|---|---|---|---|---|---|---|---|---|---|---|---|---|---|---|---|---|
| G | U | U | U | U | A | G | A | G | C | U | A | G | A | A | A | U | A | G | C | A | A | G | U | U | A | A | A | A | U |

| | | | | |
|---|---|---|---|---|
| LS1-LS6 | B1-B2 | US1-US12 | B2-B6 | LS7-LS12 |

| 31 | 32 | 33 | 34 | 35 | 36 | 37 | 38 | 39 | 40 | 41 | 42 | 43 | 44 | 45 | 46 | 47 | 48 | 49 | 50 | 51 | 52 | 53 | 54 | 55 | 56 | 57 | 58 | 59 | 60 |
|---|---|---|---|---|---|---|---|---|---|---|---|---|---|---|---|---|---|---|---|---|---|---|---|---|---|---|---|---|---|
| A | A | G | G | C | U | A | G | U | C | C | G | U | U | A | U | C | A | A | C | U | U | G | A | A | A | A | A | G | U |

| | |
|---|---|
| Nexus | H1-1 through H1-12 |

| 61 | 62 | 63 | 64 | 65 | 66 | 67 | 68 | 69 | 70 | 71 | 72 | 73 | 74 | 75 | 76 |
|---|---|---|---|---|---|---|---|---|---|---|---|---|---|---|---|
| G | G | C | A | C | C | G | A | G | U | C | G | G | U | G | C |

| | |
|---|---|
| N | H2-1 through H2-15 |

TABLE 3
Human sgRNA and modification patterns

| | | SEQ | | SEQ |
|---|---|---|---|---|
| Guide | | ID | | ID |
| ID | Full Sequence | NO: | Full Sequence Modified | NO: |
| G009844 | GAGCAACCUCACUCUUGUCUGUUUU | 34 | mG*mA*mG*CAACCUCACUCUUGUCUGU | 66 |
| | AGAGCUAGAAAUAGCAAGUUAAAAU | | UUUAGAmGmCmUmAmGmAmAmAmUm | |
| | AAGGCUAGUCCGUUAUCAACUUGAA | | AmGmCAAGUUAAAAUAAGGCUAGUCC | |
| | AAAGUGGCACCGAGUCGGUGCUUUU | | GUUAUCAmAmCmUmUmGmAmAmAmAm | |
| | | | AmGmUmGmGmCmAmCmCmGmAmGmUm | |
| | | | CmGmGmUmGmCmU*mU*mU*mU | |
| G009851 | AUGCAUUUGUUUCAAAAUAUGUUUU | 35 | mA*mU*mG*CAUUUGUUUCAAAAUAUG | 67 |
| | AGAGCUAGAAAUAGCAAGUUAAAAU | | UUUUAGAmGmCmUmAmGmAmAmAmUm | |
| | AAGGCUAGUCCGUUAUCAACUUGAA | | AmGmCAAGUUAAAAUAAGGCUAGUCCG | |
| | AAAGUGGCACCGAGUCGGUGCUUUU | | UUAUCAmAmCmUmUmGmAmAmAmAmAm | |
| | | | GmUmGmGmCmAmCmCmGmAmGmUmCm | |
| | | | GmGmUmGmCmU*mU*mU*mU | |
| G009852 | UGCAUUUGUUUCAAAAUAUUGUUUU | 36 | mU*mG*mC*AUUUGUUUCAAAAUAUUGU | 68 |
| | AGAGCUAGAAAUAGCAAGUUAAAAU | | UUUAGAmGmCmUmAmGmAmAmAmUmAm | |
| | AAGGCUAGUCCGUUAUCAACUUGAA | | GmCAAGUUAAAAUAAGGCUAGUCCGUUA | |
| | AAAGUGGCACCGAGUCGGUGCUUUU | | UCAmAmCmUmUmGmAmAmAmAmAmGmU | |
| | | | mGmGmCmAmCmCmGmAmGmUmCmGmGm | |
| | | | UmGmCmU*mU*mU*mU | |
| G009857 | AUUUAUGAGAUCAACAGCACGUUUU | 37 | mA*mU*mU*UAUGAGAUCAACAGCACGU | 69 |
| | AGAGCUAGAAAUAGCAAGUUAAAAU | | UUUAGAmGmCmUmAmGmAmAmAmUmAm | |
| | AAGGCUAGUCCGUUAUCAACUUGAA | | GmCAAGUUAAAAUAAGGCUAGUCCGUUA | |
| | AAAGUGGCACCGAGUCGGUGCUUUU | | UCAmAmCmUmUmGmAmAmAmAmAmGm | |
| | | | UmGmGmCmAmCmCmGmAmGmUmCmGmG | |
| | | | mUmGmCmU*mU*mU*mU | |
| G009858 | GAUCAACAGCACAGGUUUUGGUUUU | 38 | mG*mA*mU*CAACAGCACAGGUUUUGGU | 70 |
| | AGAGCUAGAAAUAGCAAGUUAAAAU | | UUUAGAmGmCmUmAmGmAmAmAmUmAm | |
| | AAGGCUAGUCCGUUAUCAACUUGAA | | GmCAAGUUAAAAUAAGGCUAGUCCGUUA | |
| | AAAGUGGCACCGAGUCGGUGCUUUU | | UCAmAmCmUmUmGmAmAmAmAmAmGm | |
| | | | UmGmGmCmAmCmCmGmAmGmUmCmGm | |
| | | | GmUmGmCmU*mU*mU*mU | |
| G009859 | UUAAAUAAAGCAUAGUGCAAGUUUU | 39 | mU*mU*mA*AAUAAAGCAUAGUGCAAGU | 71 |
| | AGAGCUAGAAAUAGCAAGUUAAAAU | | UUUAGAmGmCmUmAmGmAmAmAmUmAm | |
| | AAGGCUAGUCCGUUAUCAACUUGAA | | GmCAAGUUAAAAUAAGGCUAGUCCGUUA | |
| | AAAGUGGCACCGAGUCGGUGCUUUU | | UCAmAmCmUmUmGmAmAmAmAmAmGmU | |
| | | | mGmGmCmAmCmCmGmAmGmUmCmGmGm | |
| | | | UmGmCmU*mU*mU*mU | |
| G009860 | UAAAGCAUAGUGCAAUGGAUGUUUU | 40 | mU*mA*mA*AGCAUAGUGCAAUGGAUGU | 72 |
| | AGAGCUAGAAAUAGCAAGUUAAAAU | | UUUAGAmGmCmUmAmGmAmAmAmUmAm | |
| | AAGGCUAGUCCGUUAUCAACUUGAA | | GmCAAGUUAAAAUAAGGCUAGUCCGUUA | |
| | AAAGUGGCACCGAGUCGGUGCUUUU | | UCAmAmCmUmUmGmAmAmAmAmAmGmU | |
| | | | mGmGmCmAmCmCmGmAmGmUmCmGmGm | |
| | | | UmGmCmU*mU*mU*mU | |
| G009861 | UAGUGCAAUGGAUAGGUCUUGUUUU | 41 | mU*mA*mG*UGCAAUGGAUAGGUCUUGU | 73 |
| | AGAGCUAGAAAUAGCAAGUUAAAAU | | UUUAGAmGmCmUmAmGmAmAmAmUmAm | |
| | AAGGCUAGUCCGUUAUCAACUUGAA | | GmCAAGUUAAAAUAAGGCUAGUCCGUUA | |
| | AAAGUGGCACCGAGUCGGUGCUUUU | | UCAmAmCmUmUmGmAmAmAmAmAmGmU | |
| | | | mGmGmCmAmCmCmGmAmGmUmCmGmGm | |
| | | | UmGmCmU*mU*mU*mU | |
| G009866 | UACUAAAACUUUAUUUUACUGUUUU | 42 | mU*mA*mC*UAAAACUUUAUUUUACUGU | 74 |
| | AGAGCUAGAAAUAGCAAGUUAAAAU | | UUUAGAmGmCmUmAmGmAmAmAmUmAm | |
| | AAGGCUAGUCCGUUAUCAACUUGAA | | GmCAAGUUAAAAUAAGGCUAGUCCGUUA | |
| | AAAGUGGCACCGAGUCGGUGCUUUU | | UCAmAmCmUmUmGmAmAmAmAmAmGmU | |
| | | | mGmGmCmAmCmCmGmAmGmUmCmGmGm | |
| | | | UmGmCmU*mU*mU*mU | |
| G009867 | AAAGUUGAACAAUAGAAAAAGUUUU | 43 | mA*mA*mA*GUUGAACAAUAGAAAAAGU | 75 |
| | AGAGCUAGAAAUAGCAAGUUAAAAU | | UUUAGAmGmCmUmAmGmAmAmAmUmAm | |
| | AAGGCUAGUCCGUUAUCAACUUGAA | | GmCAAGUUAAAAUAAGGCUAGUCCGUUA | |
| | AAAGUGGCACCGAGUCGGUGCUUUU | | UCAmAmCmUmUmGmAmAmAmAmAmGmU | |
| | | | mGmGmCmAmCmCmGmAmGmUmCmGmGm | |
| | | | UmGmCmU*mU*mU*mU | |
| G009868 | AAUGCAUAAUCUAAGUCAAAGUUUU | 44 | mA*mA*mU*GCAUAAUCUAAGUCAAAGU | 76 |
| | AGAGCUAGAAAUAGCAAGUUAAAAU | | UUUAGAmGmCmUmAmGmAmAmAmUmAm | |
| | AAGGCUAGUCCGUUAUCAACUUGAA | | GmCAAGUUAAAAUAAGGCUAGUCCGUUA | |
| | AAAGUGGCACCGAGUCGGUGCUUUU | | UCAmAmCmUmUmGmAmAmAmAmAmGmU | |
| | | | mGmGmCmAmCmCmGmAmGmUmCmGmGm | |
| | | | UmGmCmU*mU*mU*mU | |
| G009874 | UAAUAAAAUUCAAACAUCCUGUUUU | 45 | mU*mA*mA*UAAAAUUCAAACAUCCUGU | 77 |
| | AGAGCUAGAAAUAGCAAGUUAAAAU | | UUUAGAmGmCmUmAmGmAmAmAmUmAm | |
| | AAGGCUAGUCCGUUAUCAACUUGAA | | GmCAAGUUAAAAUAAGGCUAGUCCGUUA | |
| | AAAGUGGCACCGAGUCGGUGCUUUU | | UCAmAmCmUmUmGmAmAmAmAmAmGmU | |
| | | | mGmGmCmAmCmCmGmAmGmUmCmGmGm | |
| | | | UmGmCmU*mU*mU*mU | |
| G012747 | GCAUCUUUAAAGAAUUAUUUGUUUU | 46 | mG*mC*mA*UCUUUAAAGAAUUAUUUGU | 78 |
| | AGAGCUAGAAAUAGCAAGUUAAAAU | | UUUAGAmGmCmUmAmGmAmAmAmUmAm | |
| | AAGGCUAGUCCGUUAUCAACUUGAA | | GmCAAGUUAAAAUAAGGCUAGUCCGUUA | |
| | AAAGUGGCACCGAGUCGGUGCUUUU | | UCAmAmCmUmUmGmAmAmAmAmAmGmU | |
| | | | mGmGmCmAmCmCmGmAmGmUmCmGmGm | |
| | | | UmGmCmU*mU*mU*mU | |
| G012748 | UUUGGCAUUUAUUUCUAAAAGUUUU | 47 | mU*mU*mU*GGCAUUUAUUUCUAAAAGU | 79 |
| | AGAGCUAGAAAUAGCAAGUUAAAAU | | UUUAGAmGmCmUmAmGmAmAmAmUmAm | |
| | AAGGCUAGUCCGUUAUCAACUUGAA | | GmCAAGUUAAAAUAAGGCUAGUCCGUUA | |
| | AAAGUGGCACCGAGUCGGUGCUUUU | | UCAmAmCmUmUmGmAmAmAmAmAmGmU | |
| | | | mGmGmCmAmCmCmGmAmGmUmCmGmGm | |
| | | | UmGmCmU*mU*mU*mU | |
| G012749 | UGUAUUUGUGAAGUCUUACAGUUUU | 48 | mU*mG*mU*AUUUGUGAAGUCUUACAGU | 80 |
| | AGAGCUAGAAAUAGCAAGUUAAAAU | | UUUAGAmGmCmUmAmGmAmAmAmUmAm | |
| | AAGGCUAGUCCGUUAUCAACUUGAA | | GmCAAGUUAAAAUAAGGCUAGUCCGUUA | |
| | AAAGUGGCACCGAGUCGGUGCUUUU | | UCAmAmCmUmUmGmAmAmAmAmAmGmU | |
| | | | mGmGmCmAmCmCmGmAmGmUmCmGmGm | |
| | | | UmGmCmU*mU*mU*mU | |
| G012750 | UCCUAGGUAAAAAAAAAAAAGUUUU | 49 | mU*mC*mC*UAGGUAAAAAAAAAAAAGU | 81 |
| | AGAGCUAGAAAUAGCAAGUUAAAAU | | UUUAGAmGmCmUmAmGmAmAmAmUmAm | |
| | AAGGCUAGUCCGUUAUCAACUUGAA | | GmCAAGUUAAAAUAAGGCUAGUCCGUUA | |
| | AAAGUGGCACCGAGUCGGUGCUUUU | | UCAmAmCmUmUmGmAmAmAmAmAmGmU | |
| | | | mGmGmCmAmCmCmGmAmGmUmCmGmGm | |
| | | | UmGmCmU*mU*mU*mU | |
| G012751 | UAAUUUUCUUUUGCGCACUAGUUUU | 50 | mU*mA*mA*UUUUCUUUUGCGCACUAGU | 82 |
| | AGAGCUAGAAAUAGCAAGUUAAAAU | | UUUAGAmGmCmUmAmGmAmAmAmUmAm | |
| | AAGGCUAGUCCGUUAUCAACUUGAA | | GmCAAGUUAAAAUAAGGCUAGUCCGUUA | |
| | AAAGUGGCACCGAGUCGGUGCUUUU | | UCAmAmCmUmUmGmAmAmAmAmAmGmU | |
| | | | mGmGmCmAmCmCmGmAmGmUmCmGmGm | |
| | | | UmGmCmU*mU*mU*mU | |
| G012752 | UGACUGAAACUUCACAGAAUGUUUU | 51 | mU*mG*mA*CUGAAACUUCACAGAAUGU | 83 |
| | AGAGCUAGAAAUAGCAAGUUAAAAU | | UUUAGAmGmCmUmAmGmAmAmAmUmAm | |
| | AAGGCUAGUCCGUUAUCAACUUGAA | | GmCAAGUUAAAAUAAGGCUAGUCCGUUA | |
| | AAAGUGGCACCGAGUCGGUGCUUUU | | UCAmAmCmUmUmGmAmAmAmAmAmGmU | |
| | | | mGmGmCmAmCmCmGmAmGmUmCmGmGm | |
| | | | UmGmCmU*mU*mU*mU | |
| G012753 | GACUGAAACUUCACAGAAUAGUUUU | 52 | mG*mA*mC*UGAAACUUCACAGAAUAGU | 84 |
| | AGAGCUAGAAAUAGCAAGUUAAAAU | | UUUAGAmGmCmUmAmGmAmAmAmUmAm | |
| | AAGGCUAGUCCGUUAUCAACUUGAA | | GmCAAGUUAAAAUAAGGCUAGUCCGUUA | |
| | AAAGUGGCACCGAGUCGGUGCUUUU | | UCAmAmCmUmUmGmAmAmAmAmAmGmU | |
| | | | mGmGmCmAmCmCmGmAmGmUmCmGmGm | |
| | | | UmGmCmU*mU*mU*mU | |
| G012754 | UUCAUUUUAGUCUGUCUUCUGUUUU | 53 | mU*mU*mC*AUUUUAGUCUGUCUUCUGU | 85 |
| | AGAGCUAGAAAUAGCAAGUUAAAAU | | UUUAGAmGmCmUmAmGmAmAmAmUmAm | |
| | AAGGCUAGUCCGUUAUCAACUUGAA | | GmCAAGUUAAAAUAAGGCUAGUCCGUUA | |
| | AAAGUGGCACCGAGUCGGUGCUUUU | | UCAmAmCmUmUmGmAmAmAmAmAmGmU | |
| | | | mGmGmCmAmCmCmGmAmGmUmCmGmGm | |
| | | | UmGmCmU*mU*mU*mU | |
| G012755 | AUUAUCUAAGUUUGAAUAUAGUUUU | 54 | mA*mU*mU*AUCUAAGUUUGAAUAUAGU | 86 |
| | AGAGCUAGAAAUAGCAAGUUAAAAU | | UUUAGAmGmCmUmAmGmAmAmAmUmAm | |
| | AAGGCUAGUCCGUUAUCAACUUGAA | | GmCAAGUUAAAAUAAGGCUAGUCCGUUA | |
| | AAAGUGGCACCGAGUCGGUGCUUUU | | UCAmAmCmUmUmGmAmAmAmAmAmGmU | |
| | | | mGmGmCmAmCmCmGmAmGmUmCmGmGm | |
| | | | UmGmCmU*mU*mU*mU | |
| G012756 | AAUUUUUAAAAUAGUAUUCUGUUUU | 55 | mA*mA*mU*UUUUAAAAUAGUAUUCUGU | 87 |
| | AGAGCUAGAAAUAGCAAGUUAAAAU | | UUUAGAmGmCmUmAmGmAmAmAmUmAm | |
| | AAGGCUAGUCCGUUAUCAACUUGAA | | GmCAAGUUAAAAUAAGGCUAGUCCGUUA | |
| | AAAGUGGCACCGAGUCGGUGCUUUU | | UCAmAmCmUmUmGmAmAmAmAmAmGmU | |
| | | | mGmGmCmAmCmCmGmAmGmUmCmGmGm | |
| | | | UmGmCmU*mU*mU*mU | |
| G012757 | UGAAUUAUUCUUCUGUUUAAGUUUU | 56 | mU*mG*mA*AUUAUUCUUCUGUUUAAGU | 88 |
| | AGAGCUAGAAAUAGCAAGUUAAAAU | | UUUAGAmGmCmUmAmGmAmAmAmUmAm | |
| | AAGGCUAGUCCGUUAUCAACUUGAA | | GmCAAGUUAAAAUAAGGCUAGUCCGUUA | |
| | AAAGUGGCACCGAGUCGGUGCUUUU | | UCAmAmCmUmUmGmAmAmAmAmAmGmU | |
| | | | mGmGmCmAmCmCmGmAmGmUmCmGmGm | |
| | | | UmGmCmU*mU*mU*mU | |
| G012758 | AUCAUCCUGAGUUUUUCUGUGUUUU | 57 | mA*mU*mC*AUCCUGAGUUUUUCUGUGU | 89 |
| | AGAGCUAGAAAUAGCAAGUUAAAAU | | UUUAGAmGmCmUmAmGmAmAmAmUmAm | |
| | AAGGCUAGUCCGUUAUCAACUUGAA | | GmCAAGUUAAAAUAAGGCUAGUCCGUUA | |
| | AAAGUGGCACCGAGUCGGUGCUUUU | | UCAmAmCmUmUmGmAmAmAmAmAmGmU | |
| | | | mGmGmCmAmCmCmGmAmGmUmCmGmGm | |
| | | | UmGmCmU*mU*mU*mU | |
| G012759 | UUACUAAAACUUUAUUUUACGUUUU | 58 | mU*mU*mA*CUAAAACUUUAUUUUACGU | 90 |
| | AGAGCUAGAAAUAGCAAGUUAAAAU | | UUUAGAmGmCmUmAmGmAmAmAmUmAm | |
| | AAGGCUAGUCCGUUAUCAACUUGAA | | GmCAAGUUAAAAUAAGGCUAGUCCGUUA | |
| | AAAGUGGCACCGAGUCGGUGCUUUU | | UCAmAmCmUmUmGmAmAmAmAmAmGmU | |
| | | | mGmGmCmAmCmCmGmAmGmUmCmGmGm | |
| | | | UmGmCmU*mU*mU*mU | |
| G012760 | ACCUUUUUUUUUUUUUACCUGUUUU | 59 | mA*mC*mC*UUUUUUUUUUUUUACCUGU | 91 |
| | AGAGCUAGAAAUAGCAAGUUAAAAU | | UUUAGAmGmCmUmAmGmAmAmAmUmAm | |
| | AAGGCUAGUCCGUUAUCAACUUGAA | | GmCAAGUUAAAAUAAGGCUAGUCCGUUA | |
| | AAAGUGGCACCGAGUCGGUGCUUUU | | UCAmAmCmUmUmGmAmAmAmAmAmGmU | |
| | | | mGmGmCmAmCmCmGmAmGmUmCmGmGm | |
| | | | UmGmCmU*mU*mU*mU | |
| G012761 | AGUGCAAUGGAUAGGUCUUUGUUUU | 60 | mA*mG*mU*GCAAUGGAUAGGUCUUUGU | 92 |
| | AGAGCUAGAAAUAGCAAGUUAAAAU | | UUUAGAmGmCmUmAmGmAmAmAmUmAm | |
| | AAGGCUAGUCCGUUAUCAACUUGAA | | GmCAAGUUAAAAUAAGGCUAGUCCGUUA | |
| | AAAGUGGCACCGAGUCGGUGCUUUU | | UCAmAmCmUmUmGmAmAmAmAmAmGmU | |
| | | | mGmGmCmAmCmCmGmAmGmUmCmGmGm | |
| | | | UmGmCmU*mU*mU*mU | |
| G012762 | UGAUUCCUACAGAAAAACUCGUUUU | 61 | mU*mG*mA*UUCCUACAGAAAAACUCGU | 93 |
| | AGAGCUAGAAAUAGCAAGUUAAAAU | | UUUAGAmGmCmUmAmGmAmAmAmUmAm | |
| | AAGGCUAGUCCGUUAUCAACUUGAA | | GmCAAGUUAAAAUAAGGCUAGUCCGUUA | |
| | AAAGUGGCACCGAGUCGGUGCUUUU | | UCAmAmCmUmUmGmAmAmAmAmAmGmU | |
| | | | mGmGmCmAmCmCmGmAmGmUmCmGmGm | |
| | | | UmGmCmU*mU*mU*mU | |
| G012763 | UGGGCAAGGGAAGAAAAAAAGUUUU | 62 | mU*mG*mG*GCAAGGGAAGAAAAAAAGU | 94 |
| | AGAGCUAGAAAUAGCAAGUUAAAAU | | UUUAGAmGmCmUmAmGmAmAmAmUmAm | |
| | AAGGCUAGUCCGUUAUCAACUUGAA | | GmCAAGUUAAAAUAAGGCUAGUCCGUUA | |
| | AAAGUGGCACCGAGUCGGUGCUUUU | | UCAmAmCmUmUmGmAmAmAmAmAmGmU | |
| | | | mGmGmCmAmCmCmGmAmGmUmCmGmGm | |
| | | | UmGmCmU*mU*mU*mU | |
| G012764 | CCUCACUCUUGUCUGGGCAAGUUUU | 63 | mC*mC*mU*CACUCUUGUCUGGGCAAGUU | 95 |
| | AGAGCUAGAAAUAGCAAGUUAAAAU | | UUAGAmGmCmUmAmGmAmAmAmUmAmG | |
| | AAGGCUAGUCCGUUAUCAACUUGAA | | mCAAGUUAAAAUAAGGCUAGUCCGUUAU | |
| | AAAGUGGCACCGAGUCGGUGCUUUU | | CAmAmCmUmUmGmAmAmAmAmAmGmU | |
| | | | mGmGmCmAmCmCmGmAmGmUmCmGmGm | |
| | | | UmGmCmU*mU*mU*mU | |
| G012765 | ACCUCACUCUUGUCUGGGCAGUUUU | 64 | mA*mC*mC*UCACUCUUGUCUGGGCAGUU | 96 |
| | AGAGCUAGAAAUAGCAAGUUAAAAU | | UUAGAmGmCmUmAmGmAmAmAmUmAmG | |
| | AAGGCUAGUCCGUUAUCAACUUGAA | | mCAAGUUAAAAUAAGGCUAGUCCGUUAU | |
| | AAAGUGGCACCGAGUCGGUGCUUUU | | CAmAmCmUmUmGmAmAmAmAmAmGmU | |
| | | | mGmGmCmAmCmCmGmAmGmUmCmGmGm | |
| | | | UmGmCmU*mU*mU*mU | |
| G012766 | UGAGCAACCUCACUCUUGUCGUUUU | 65 | mU*mG*mA*GCAACCUCACUCUUGUCGUU | 97 |
| | AGAGCUAGAAAUAGCAAGUUAAAAU | | UUAGAmGmCmUmAmGmAmAmAmUmAmG | |
| | AAGGCUAGUCCGUUAUCAACUUGAA | | mCAAGUUAAAAUAAGGCUAGUCCGUUAU | |
| | AAAGUGGCACCGAGUCGGUGCUUUU | | CAmAmCmUmUmGmAmAmAmAmAmGmU | |
| | | | mGmGmCmAmCmCmGmAmGmUmCmGmGm | |
| | | | UmGmCmU*mU*mU*mU | |

TABLE 4
Mouse albumin guide RNA

| | | | SEQ |
|---|---|---|---|
| | | | ID |
| Guide ID | Guide Sequence | Mouse Genomic Coordinates (mm10) | NO: |
| G000551 | AUUUGCAUCUGAGAACCCUU | chr5:90461148-90461168 | 98 |
| G000552 | AUCGGGAACUGGCAUCUUCA | chr5:90461590-90461610 | 99 |
| G000553 | GUUACAGGAAAAUCUGAAGG | chr5:90461569-90461589 | 100 |
| G000554 | GAUCGGGAACUGGCAUCUUC | chr5:90461589-90461609 | 101 |
| G000555 | UGCAUCUGAGAACCCUUAGG | chr5:90461151-90461171 | 102 |
| G000666 | CACUCUUGUCUGUGGAAACA | chr5:90461709-90461729 | 103 |
| G000667 | AUCGUUACAGGAAAAUCUGA | chr5:90461572-90461592 | 104 |
| G000668 | GCAUCUUCAGGGAGUAGCUU | chr5:90461601-90461621 | 105 |
| G000669 | CAAUCUUUAAAUAUGUUGUG | chr5:90461674-90461694 | 106 |
| G000670 | UCACUCUUGUCUGUGGAAAC | chr5:90461710-90461730 | 107 |
| G011722 | UGCUUGUAUUUUUCUAGUAA | chr5:90461039-90461059 | 108 |
| G011723 | GUAAAUAUCUACUAAGACAA | chr5:90461425-90461445 | 109 |
| G011724 | UUUUUCUAGUAAUGGAAGCC | chr5:90461047-90461067 | 110 |
| G011725 | UUAUAUUAUUGAUAUAUUUU | chr5:90461174-90461194 | 111 |
| G011726 | GCACAGAUAUAAACACUUAA | chr5:90461480-90461500 | 112 |
| G011727 | CACAGAUAUAAACACUUAAC | chr5:90461481-90461501 | 113 |
| G011728 | GGUUUUAAAAAUAAUAAUGU | chr5:90461502-90461522 | 114 |
| G011729 | UCAGAUUUUCCUGUAACGAU | chr5:90461572-90461592 | 115 |
| G011730 | CAGAUUUUCCUGUAACGAUC | chr5:90461573-90461593 | 116 |
| G011731 | CAAUGGUAAAUAAGAAAUAA | chr5:90461408-90461428 | 117 |
| G013018 | GGAAAAUCUGAAGGUGGCAA | chr5:90461563-90461583 | 118 |
| G013019 | GGCGAUCUCACUCUUGUCUG | chr5:90461717-90461737 | 119 |

TABLE 5
Mouse albumin guide sgRNA and modification pattern

| Guide | | SEQ ID | | SEQ ID |
|---|---|---|---|---|
| ID | Full Sequence | NO: | Full Sequence Modified | NO: |
| G000551 | AUUUGCAUCUGAGAACCCUU | 120 | mA*mU*mU*UGCAUCUGA | 142 |
| | GUUUUAGAGCUAGAAAUAGC | | GAACCCUUGUUUUAGAm | |
| | AAGUUAAAAUAAGGCUAGUC | | GmCmUmAmGmAmAmAmU | |
| | CGUUAUCAACUUGAAAAAGU | | mAmGmCAAGUUAAAAUA | |
| | GGCACCGAGUCGGUGCUUUU | | AGGCUAGUCCGUUAUCAm | |
| | | | AmCmUmUmGmAmAmAmA | |
| | | | mAmGmUmGmGmCmAmCm | |
| | | | CmGmAmGmUmCmGmGmU | |
| | | | mGmCmU*mU*mU*mU | |
| G000552 | AUCGGGAACUGGCAUCUUCA | 121 | mA*mU*mC*GGGAACUGG | 143 |
| | GUUUUAGAGCUAGAAAUAGC | | CAUCUUCAGUUUUAGAm | |
| | AAGUUAAAAUAAGGCUAGUC | | GmCmUmAmGmAmAmAmU | |
| | CGUUAUCAACUUGAAAAAGU | | mAmGmCAAGUUAAAAUA | |
| | GGCACCGAGUCGGUGCUUUU | | AGGCUAGUCCGUUAUCAm | |
| | | | AmCmUmUmGmAmAmAmA | |
| | | | mAmGmUmGmGmCmAmCm | |
| | | | CmGmAmGmUmCmGmGmU | |
| | | | mGmCmU*mU*mU*mU | |
| G000553 | GUUACAGGAAAAUCUGAAGG | 122 | mG*mU*mU*ACAGGAAAA | 144 |
| | GUUUUAGAGCUAGAAAUAGC | | UCUGAAGGGUUUUAGAm | |
| | AAGUUAAAAUAAGGCUAGUC | | GmCmUmAmGmAmAmAmU | |
| | CGUUAUCAACUUGAAAAAGU | | mAmGmCAAGUUAAAAUA | |
| | GGCACCGAGUCGGUGCUUUU | | AGGCUAGUCCGUUAUCAm | |
| | | | AmCmUmUmGmAmAmAmA | |
| | | | mAmGmUmGmGmCmAmCm | |
| | | | CmGmAmGmUmCmGmGmU | |
| | | | mGmCmU*mU*mU*mU | |
| G000554 | GAUCGGGAACUGGCAUCUUC | 123 | mG*mA*mU*CGGGAACUG | 145 |
| | GUUUUAGAGCUAGAAAUAGC | | GCAUCUUCGUUUUAGAm | |
| | AAGUUAAAAUAAGGCUAGUC | | GmCmUmAmGmAmAmAmU | |
| | CGUUAUCAACUUGAAAAAGU | | mAmGmCAAGUUAAAAUA | |
| | GGCACCGAGUCGGUGCUUUU | | AGGCUAGUCCGUUAUCAm | |
| | | | AmCmUmUmGmAmAmAmA | |
| | | | mAmGmUmGmGmCmAmCm | |
| | | | CmGmAmGmUmCmGmGmU | |
| | | | mGmCmU*mU*mU*mU | |
| G000555 | UGCAUCUGAGAACCCUUAGG | 124 | mU*mG*mC*AUCUGAGAA | 146 |
| | GUUUUAGAGCUAGAAAUAGC | | CCCUUAGGGUUUUAGAm | |
| | AAGUUAAAAUAAGGCUAGUC | | GmCmUmAmGmAmAmAmU | |
| | CGUUAUCAACUUGAAAAAGU | | mAmGmCAAGUUAAAAUA | |
| | GGCACCGAGUCGGUGCUUUU | | AGGCUAGUCCGUUAUCAm | |
| | | | AmCmUmUmGmAmAmAmA | |
| | | | mAmGmUmGmGmCmAmCm | |
| | | | CmGmAmGmUmCmGmGmU | |
| | | | mGmCmU*mU*mU*mU | |
| G000666 | CACUCUUGUCUGUGGAAACA | 125 | mC*mA*mC*UCUUGUCUG | 147 |
| | GUUUUAGAGCUAGAAAUAGC | | UGGAAACAGUUUUAGAm | |
| | AAGUUAAAAUAAGGCUAGUC | | GmCmUmAmGmAmAmAmU | |
| | CGUUAUCAACUUGAAAAAGU | | mAmGmCAAGUUAAAAUA | |
| | GGCACCGAGUCGGUGCUUUU | | AGGCUAGUCCGUUAUCAm | |
| | | | AmCmUmUmGmAmAmAmA | |
| | | | mAmGmUmGmGmCmAmCm | |
| | | | CmGmAmGmUmCmGmGmU | |
| | | | mGmCmU*mU*mU*mU | |
| G000667 | AUCGUUACAGGAAAAUCUGA | 126 | mA*mU*mC*GUUACAGGA | 148 |
| | GUUUUAGAGCUAGAAAUAGC | | AAAUCUGAGUUUUAGAm | |
| | AAGUUAAAAUAAGGCUAGUC | | GmCmUmAmGmAmAmAmU | |
| | CGUUAUCAACUUGAAAAAGU | | mAmGmCAAGUUAAAAUA | |
| | GGCACCGAGUCGGUGCUUUU | | AGGCUAGUCCGUUAUCAm | |
| | | | AmCmUmUmGmAmAmAmA | |
| | | | mAmGmUmGmGmCmAmCm | |
| | | | CmGmAmGmUmCmGmGmU | |
| | | | mGmCmU*mU*mU*mU | |
| G000668 | GCAUCUUCAGGGAGUAGCUU | 127 | mG*mC*mA*UCUUCAGGG | 149 |
| | GUUUUAGAGCUAGAAAUAGC | | AGUAGCUUGUUUUAGAm | |
| | AAGUUAAAAUAAGGCUAGUC | | GmCmUmAmGmAmAmAmU | |
| | CGUUAUCAACUUGAAAAAGU | | mAmGmCAAGUUAAAAUA | |
| | GGCACCGAGUCGGUGCUUUU | | AGGCUAGUCCGUUAUCAm | |
| | | | AmCmUmUmGmAmAmAmA | |
| | | | mAmGmUmGmGmCmAmCm | |
| | | | CmGmAmGmUmCmGmGmU | |
| | | | mGmCmU*mU*mU*mU | |
| G000669 | CAAUCUUUAAAUAUGUUGUG | 128 | mC*mA*mA*UCUUUAAAU | 150 |
| | GUUUUAGAGCUAGAAAUAGC | | AUGUUGUGGUUUUAGAm | |
| | AAGUUAAAAUAAGGCUAGUC | | GmCmUmAmGmAmAmAmU | |
| | CGUUAUCAACUUGAAAAAGU | | mAmGmCAAGUUAAAAUA | |
| | GGCACCGAGUCGGUGCUUUU | | AGGCUAGUCCGUUAUCAm | |
| | | | AmCmUmUmGmAmAmAmA | |
| | | | mAmGmUmGmGmCmAmCm | |
| | | | CmGmAmGmUmCmGmGmU | |
| | | | mGmCmU*mU*mU*mU | |
| G000670 | UCACUCUUGUCUGUGGAAAC | 129 | mU*mC*mA*CUCUUGUCU | 151 |
| | GUUUUAGAGCUAGAAAUAGC | | GUGGAAACGUUUUAGAm | |
| | AAGUUAAAAUAAGGCUAGUC | | GmCmUmAmGmAmAmAmU | |
| | CGUUAUCAACUUGAAAAAGU | | mAmGmCAAGUUAAAAUA | |
| | GGCACCGAGUCGGUGCUUUU | | AGGCUAGUCCGUUAUCAm | |
| | | | AmCmUmUmGmAmAmAmA | |
| | | | mAmGmUmGmGmCmAmCm | |
| | | | CmGmAmGmUmCmGmGmU | |
| | | | mGmCmU*mU*mU*mU | |
| G011722 | UGCUUGUAUUUUUCUAGUAA | 130 | mU*mG*mC*UUGUAUUUU | 152 |
| | GUUUUAGAGCUAGAAAUAGC | | UCUAGUAAGUUUUAGAm | |
| | AAGUUAAAAUAAGGCUAGUC | | GmCmUmAmGmAmAmAmU | |
| | CGUUAUCAACUUGAAAAAGU | | mAmGmCAAGUUAAAAUA | |
| | GGCACCGAGUCGGUGCUUUU | | AGGCUAGUCCGUUAUCAm | |
| | | | AmCmUmUmGmAmAmAmA | |
| | | | mAmGmUmGmGmCmAmCm | |
| | | | CmGmAmGmUmCmGmGmU | |
| | | | mGmCmU*mU*mU*mU | |
| G011723 | GUAAAUAUCUACUAAGACAA | 131 | mG*mU*mA*AAUAUCUAC | 153 |
| | GUUUUAGAGCUAGAAAUAGC | | UAAGACAAGUUUUAGAm | |
| | AAGUUAAAAUAAGGCUAGUC | | GmCmUmAmGmAmAmAmU | |
| | CGUUAUCAACUUGAAAAAGU | | mAmGmCAAGUUAAAAUA | |
| | GGCACCGAGUCGGUGCUUUU | | AGGCUAGUCCGUUAUCAm | |
| | | | AmCmUmUmGmAmAmAmA | |
| | | | mAmGmUmGmGmCmAmCm | |
| | | | CmGmAmGmUmCmGmGmU | |
| | | | mGmCmU*mU*mU*mU | |
| G011724 | UUUUUCUAGUAAUGGAAGCC | 132 | mU*mU*mU*UUCUAGUAA | 154 |
| | GUUUUAGAGCUAGAAAUAGC | | UGGAAGCCGUUUUAGAm | |
| | AAGUUAAAAUAAGGCUAGUC | | GmCmUmAmGmAmAmAmU | |
| | CGUUAUCAACUUGAAAAAGU | | mAmGmCAAGUUAAAAUA | |
| | GGCACCGAGUCGGUGCUUUU | | AGGCUAGUCCGUUAUCAm | |
| | | | AmCmUmUmGmAmAmAmA | |
| | | | mAmGmUmGmGmCmAmCm | |
| | | | CmGmAmGmUmCmGmGmU | |
| | | | mGmCmU*mU*mU*mU | |
| G011725 | UUAUAUUAUUGAUAUAUUUU | 133 | mU*mU*mA*UAUUAUUGA | 155 |
| | GUUUUAGAGCUAGAAAUAGC | | UAUAUUUUGUUUUAGAm | |
| | AAGUUAAAAUAAGGCUAGUC | | GmCmUmAmGmAmAmAmU | |
| | CGUUAUCAACUUGAAAAAGU | | mAmGmCAAGUUAAAAUA | |
| | GGCACCGAGUCGGUGCUUUU | | AGGCUAGUCCGUUAUCAm | |
| | | | AmCmUmUmGmAmAmAmA | |
| | | | mAmGmUmGmGmCmAmCm | |
| | | | CmGmAmGmUmCmGmGmU | |
| | | | mGmCmU*mU*mU*mU | |
| G011726 | GCACAGAUAUAAACACUUAA | 134 | mG*mC*mA*CAGAUAUAA | 156 |
| | GUUUUAGAGCUAGAAAUAGC | | ACACUUAAGUUUUAGAm | |
| | AAGUUAAAAUAAGGCUAGUC | | GmCmUmAmGmAmAmAmU | |
| | CGUUAUCAACUUGAAAAAGU | | mAmGmCAAGUUAAAAUA | |
| | GGCACCGAGUCGGUGCUUUU | | AGGCUAGUCCGUUAUCAm | |
| | | | AmCmUmUmGmAmAmAmA | |
| | | | mAmGmUmGmGmCmAmCm | |
| | | | CmGmAmGmUmCmGmGmU | |
| | | | mGmCmU*mU*mU*mU | |
| G011727 | CACAGAUAUAAACACUUAAC | 135 | mC*mA*mC*AGAUAUAAA | 157 |
| | GUUUUAGAGCUAGAAAUAGC | | CACUUAACGUUUUAGAm | |
| | AAGUUAAAAUAAGGCUAGUC | | GmCmUmAmGmAmAmAmU | |
| | CGUUAUCAACUUGAAAAAGU | | mAmGmCAAGUUAAAAUA | |
| | GGCACCGAGUCGGUGCUUUU | | AGGCUAGUCCGUUAUCAm | |
| | | | AmCmUmUmGmAmAmAmA | |
| | | | mAmGmUmGmGmCmAmCm | |
| | | | CmGmAmGmUmCmGmGmU | |
| | | | mGmCmU*mU*mU*mU | |
| G011728 | GGUUUUAAAAAUAAUAAUGU | 136 | mG*mG*mU*UUUAAAAAU | 158 |
| | GUUUUAGAGCUAGAAAUAGC | | AAUAAUGUGUUUUAGAm | |
| | AAGUUAAAAUAAGGCUAGUC | | GmCmUmAmGmAmAmAmU | |
| | CGUUAUCAACUUGAAAAAGU | | mAmGmCAAGUUAAAAUA | |
| | GGCACCGAGUCGGUGCUUUU | | AGGCUAGUCCGUUAUCAm | |
| | | | AmCmUmUmGmAmAmAmA | |
| | | | mAmGmUmGmGmCmAmCm | |
| | | | CmGmAmGmUmCmGmGmU | |
| | | | mGmCmU*mU*mU*mU | |
| G011729 | UCAGAUUUUCCUGUAACGAU | 137 | mU*mC*mA*GAUUUUCCU | 159 |
| | GUUUUAGAGCUAGAAAUAGC | | GUAACGAUGUUUUAGAm | |
| | AAGUUAAAAUAAGGCUAGUC | | GmCmUmAmGmAmAmAmU | |
| | CGUUAUCAACUUGAAAAAGU | | mAmGmCAAGUUAAAAUA | |
| | GGCACCGAGUCGGUGCUUUU | | AGGCUAGUCCGUUAUCAm | |
| | | | AmCmUmUmGmAmAmAmA | |
| | | | mAmGmUmGmGmCmAmCm | |
| | | | CmGmAmGmUmCmGmGmU | |
| | | | mGmCmU*mU*mU*mU | |
| G011730 | CAGAUUUUCCUGUAACGAUC | 138 | mC*mA*mG*AUUUUCCUG | 160 |
| | GUUUUAGAGCUAGAAAUAGC | | UAACGAUCGUUUUAGAm | |
| | AAGUUAAAAUAAGGCUAGUC | | GmCmUmAmGmAmAmAmU | |
| | CGUUAUCAACUUGAAAAAGU | | mAmGmCAAGUUAAAAUA | |
| | GGCACCGAGUCGGUGCUUUU | | AGGCUAGUCCGUUAUCAm | |
| | | | AmCmUmUmGmAmAmAmA | |
| | | | mAmGmUmGmGmCmAmCm | |
| | | | CmGmAmGmUmCmGmGmU | |
| | | | mGmCmU*mU*mU*mU | |
| G011731 | CAAUGGUAAAUAAGAAAUAA | 139 | mC*mA*mA*UGGUAAAUA | 161 |
| | GUUUUAGAGCUAGAAAUAGC | | AGAAAUAAGUUUUAGAm | |
| | AAGUUAAAAUAAGGCUAGUC | | GmCmUmAmGmAmAmAmU | |
| | CGUUAUCAACUUGAAAAAGU | | mAmGmCAAGUUAAAAUA | |
| | GGCACCGAGUCGGUGCUUUU | | AGGCUAGUCCGUUAUCAm | |
| | | | AmCmUmUmGmAmAmAmA | |
| | | | mAmGmUmGmGmCmAmCm | |
| | | | CmGmAmGmUmCmGmGmU | |
| | | | mGmCmU*mU*mU*mU | |
| G013018 | GGAAAAUCUGAAGGUGGCAA | 140 | mG*mG*mA*AAAUCUGAA | 162 |
| | GUUUUAGAGCUAGAAAUAGC | | GGUGGCAAGUUUUAGAm | |
| | AAGUUAAAAUAAGGCUAGUC | | GmCmUmAmGmAmAmAmU | |
| | CGUUAUCAACUUGAAAAAGU | | mAmGmCAAGUUAAAAUA | |
| | GGCACCGAGUCGGUGCUUUU | | AGGCUAGUCCGUUAUCAm | |
| | | | AmCmUmUmGmAmAmAmA | |
| | | | mAmGmUmGmGmCmAmCm | |
| | | | CmGmAmGmUmCmGmGmU | |
| | | | mGmCmU*mU*mU*mU | |
| G013019 | GGCGAUCUCACUCUUGUCUG | 141 | mG*mG*mC*GAUCUCACU | 163 |
| | GUUUUAGAGCUAGAAAUAGC | | CUUGUCUGGUUUUAGAm | |
| | AAGUUAAAAUAAGGCUAGUC | | GmCmUmAmGmAmAmAmU | |
| | CGUUAUCAACUUGAAAAAGU | | mAmGmCAAGUUAAAAUA | |
| | GGCACCGAGUCGGUGCUUUU | | AGGCUAGUCCGUUAUCAm | |
| | | | AmCmUmUmGmAmAmAmA | |
| | | | mAmGmUmGmGmCmAmCm | |
| | | | CmGmAmGmUmCmGmGmU | |
| | | | mGmCmU*mU*mU*mU | |

TABLE 6
Cyno albumin guide RNA

| | | | SEQ |
|---|---|---|---|
| | | | ID |
| Guide ID | Guide Sequence | Cyno Genomic Coordinates (mf5) | NO: |
| G009844 | GAGCAACCUCACUCUUGUCU | chr5:61198711-61198731 | 2* |
| G009845 | AGCAACCUCACUCUUGUCUG | chr5:61198712-61198732 | 165 |
| G009846 | ACCUCACUCUUGUCUGGGGA | chr5:61198716-61198736 | 166 |
| G009847 | CCUCACUCUUGUCUGGGGAA | chr5:61198717-61198737 | 167 |
| G009848 | CUCACUCUUGUCUGGGGAAG | chr5:61198718-61198738 | 168 |
| G009849 | GGGGAAGGGGAGAAAAAAAA | chr5:61198731-61198751 | 169 |
| G009850 | GGGAAGGGGAGAAAAAAAAA | chr5:61198732-61198752 | 170 |
| G009851 | AUGCAUUUGUUUCAAAAUAU | chr5:61198825-61198845 | 3* |
| G009852 | UGCAUUUGUUUCAAAAUAUU | chr5:61198826-61198846 | 4* |
| G009853 | UGAUUCCUACAGAAAAAGUC | chr5:61198852-61198872 | 173 |
| G009854 | UACAGAAAAAGUCAGGAUAA | chr5:61198859-61198879 | 174 |
| G009855 | UUUCUUCUGCCUUUAAACAG | chr5:61198889-61198909 | 175 |
| G009856 | UUAUAGUUUUAUAUUCAAAC | chr5:61198957-61198977 | 176 |
| G009857 | AUUUAUGAGAUCAACAGCAC | chr5:61199062-61199082 | 5* |
| G009858 | GAUCAACAGCACAGGUUUUG | chr5:61199070-61199090 | 6* |
| G009859 | UUAAAUAAAGCAUAGUGCAA | chr5:61199096-61199116 | 7* |
| G009860 | UAAAGCAUAGUGCAAUGGAU | chr5:61199101-61199121 | 8* |
| G009861 | UAGUGCAAUGGAUAGGUCUU | chr5:61199108-61199128 | 9* |
| G009862 | AGUGCAAUGGAUAGGUCUUA | chr5:61199109-61199129 | 182 |
| G009863 | UUACUUUGCACUUUCCUUAG | chr5:61199186-61199206 | 183 |
| G009864 | UACUUUGCACUUUCCUUAGU | chr5:61199187-61199207 | 184 |
| G009865 | UCUGACCUUUUAUUUUACCU | chr5:61199238-61199258 | 185 |
| G009866 | UACUAAAACUUUAUUUUACU | chr5:61199367-61199387 | 10* |
| G009867 | AAAGUUGAACAAUAGAAAAA | chr5:61199401-61199421 | 11* |
| G009868 | AAUGCAUAAUCUAAGUCAAA | chr5:61198812-61198832 | 12* |
| G009869 | AUUAUCCUGACUUUUUCUGU | chr5:61198860-61198880 | 189 |
| G009870 | UGAAUUAUUCCUCUGUUUAA | chr5:61198901-61198921 | 190 |
| G009871 | UAAUUUUCUUUUGCCCACUA | chr5:61199203-61199223 | 191 |
| G009872 | AAAAGGUCAGAAUUGUUUAG | chr5:61199229-61199249 | 192 |
| G009873 | AACAUCCUAGGUAAAAUAAA | chr5:61199246-61199266 | 193 |
| G009874 | UAAUAAAAUUCAAACAUCCU | chr5:61199258-61199278 | 13 |
| G009875 | UUGUCAUGUAUUUCUAAAAU | chr5:61199322-61199342 | 195 |
| G009876 | UUUGUCAUGUAUUUCUAAAA | chr5:61199323-61199343 | 196 |

SEQ ID NOs marked with an “*” above indicate that the indicated gRNA is applicable to both cyno and human.

TABLE 7
Cyno sgRNA and modification patterns

| | | SEQ | | SEQ |
|---|---|---|---|---|
| Guide | | ID | | ID |
| ID | Full Sequence | NO: | Full Sequence Modified | NO: |
| G009844 | GAGCAACCUCACUCUUGUCU | 34* | mG*mA*mG*CAACCUCACUCUUGUCUGUUUUAG | 66* |
| | GUUUUAGAGCUAGAAAUAGC | | AmGmCmUmAmGmAmAmAmUmAmGmCAAGUUA | |
| | AAGUUAAAAUAAGGCUAGUC | | AAAUAAGGCUAGUCCGUUAUCAmAmCmUmUm | |
| | CGUUAUCAACUUGAAAAAGU | | GmAmAmAmAmAmGmUmGmGmCmAmCmCmGm | |
| | GGCACCGAGUCGGUGCUUUU | | AmGmUmCmGmGmUmGmCmU*mU*mU*mU | |
| G009845 | AGCAACCUCACUCUUGUCUG | 198 | mA*mG*mC*AACCUCACUCUUGUCUGGUUUUAG | 231 |
| | GUUUUAGAGCUAGAAAUAGC | | AmGmCmUmAmGmAmAmAmUmAmGmCAAGUUA | |
| | AAGUUAAAAUAAGGCUAGUC | | AAAUAAGGCUAGUCCGUUAUCAmAmCmUmUm | |
| | CGUUAUCAACUUGAAAAAGU | | GmAmAmAmAmAmGmUmGmGmCmAmCmCmGm | |
| | GGCACCGAGUCGGUGCUUUU | | AmGmUmCmGmGmUmGmCmU*mU*mU*mU | |
| G009846 | ACCUCACUCUUGUCUGGGGA | 199 | mA*mC*mC*UCACUCUUGUCUGGGGAGUUUU | 232 |
| | GUUUUAGAGCUAGAAAUAGC | | AGAmGmCmUmAmGmAmAmAmUmAmGmCAA | |
| | AAGUUAAAAUAAGGCUAGUC | | GUUAAAAUAAGGCUAGUCCGUUAUCAmAmCm | |
| | CGUUAUCAACUUGAAAAAGU | | UmUmGmAmAmAmAmAmGmUmGmGmCmAmCm | |
| | GGCACCGAGUCGGUGCUUUU | | CmGmAmGmUmCmGmGmUmGmCmU*mU*mU*mU | |
| G009847 | CCUCACUCUUGUCUGGGGAA | 200 | mC*mC*mU*CACUCUUGUCUGGGGAAGUUUUA | 233 |
| | GUUUUAGAGCUAGAAAUAGC | | GAmGmCmUmAmGmAmAmAmUmAmGmCAAGU | |
| | AAGUUAAAAUAAGGCUAGUC | | UAAAAUAAGGCUAGUCCGUUAUCAmAmCmUm | |
| | CGUUAUCAACUUGAAAAAGU | | UmGmAmAmAmAmAmGmUmGmGmCmAmCmCm | |
| | GGCACCGAGUCGGUGCUUUU | | GmAmGmUmCmGmGmUmGmCmU*mU*mU*mU | |
| G009848 | CUCACUCUUGUCUGGGGAAG | 201 | mC*mU*mC*ACUCUUGUCUGGGGAAGGUUUU | 234 |
| | GUUUUAGAGCUAGAAAUAGC | | AGAmGmCmUmAmGmAmAmAmUmAmGmCAA | |
| | AAGUUAAAAUAAGGCUAGUC | | GUUAAAAUAAGGCUAGUCCGUUAUCAmAmCm | |
| | CGUUAUCAACUUGAAAAAGU | | UmUmGmAmAmAmAmAmGmUmGmGmCmAmCm | |
| | GGCACCGAGUCGGUGCUUUU | | CmGmAmGmUmCmGmGmUmGmCmU*mU*mU*mU | |
| G009849 | GGGGAAGGGGAGAAAAAAAA | 202 | mG*mG*mG*GAAGGGGAGAAAAAAAAGUUUUAG | 235 |
| | GUUUUAGAGCUAGAAAUAGC | | AmGmCmUmAmGmAmAmAmUmAmGmCAAGUUAA | |
| | AAGUUAAAAUAAGGCUAGUC | | AAUAAGGCUAGUCCGUUAUCAmAmCmUmUmGm | |
| | CGUUAUCAACUUGAAAAAGU | | AmAmAmAmAmGmUmGmGmCmAmCmCmGmAmGm | |
| | GGCACCGAGUCGGUGCUUUU | | UmCmGmGmUmGmCmU*mU*mU*mU | |
| G009850 | GGGAAGGGGAGAAAAAAAAA | 203 | mG*mG*mG*AAGGGGAGAAAAAAAAAGUUUUAG | 236 |
| | GUUUUAGAGCUAGAAAUAGC | | AmGmCmUmAmGmAmAmAmUmAmGmCAAGUUAA | |
| | AAGUUAAAAUAAGGCUAGUC | | AAUAAGGCUAGUCCGUUAUCAmAmCmUmUmGm | |
| | CGUUAUCAACUUGAAAAAGU | | AmAmAmAmAmGmUmGmGmCmAmCmCmGmAmGm | |
| | GGCACCGAGUCGGUGCUUUU | | UmCmGmGmUmGmCmUmU*mU*mU | |
| G009851 | AUGCAUUUGUUUCAAAAUAU | 35* | mA*mU*mG*CAUUUGUUUCAAAAUAUGUUUUAG | 67* |
| | GUUUUAGAGCUAGAAAUAGC | | AmGmCmUmAmGmAmAmAmUmAmGmCAAGUUAA | |
| | AAGUUAAAAUAAGGCUAGUC | | AAUAAGGCUAGUCCGUUAUCAmAmCmUmUmGm | |
| | CGUUAUCAACUUGAAAAAGU | | AmAmAmAmAmGmUmGmGmCmAmCmCmGmAmGm | |
| | GGCACCGAGUCGGUGCUUUU | | UmCmGmGmUmGmCmU*mU*mU*mU | |
| G009852 | UGCAUUUGUUUCAAAAUAUU | 36* | mU*mG*mC*AUUUGUUUCAAAAUAUUGUUUUAG | 68* |
| | GUUUUAGAGCUAGAAAUAGC | | AmGmCmUmAmGmAmAmAmUmAmGmCAAGUUAA | |
| | AAGUUAAAAUAAGGCUAGUC | | AAUAAGGCUAGUCCGUUAUCAmAmCmUmUmGm | |
| | CGUUAUCAACUUGAAAAAGU | | AmAmAmAmAmGmUmGmGmCmAmCmCmGmAmGm | |
| | GGCACCGAGUCGGUGCUUUU | | UmCmGmGmUmGmCmU*mU*mU*mU | |
| G009853 | UGAUUCCUACAGAAAAAGUC | 206 | mU*mG*mA*UUCCUACAGAAAAAGUCGUUUUAG | 239 |
| | GUUUUAGAGCUAGAAAUAGC | | AmGmCmUmAmGmAmAmAmUmAmGmCAAGUUAA | |
| | AAGUUAAAAUAAGGCUAGUC | | AAUAAGGCUAGUCCGUUAUCAmAmCmUmUmGm | |
| | CGUUAUCAACUUGAAAAAGU | | AmAmAmAmAmGmUmGmGmCmAmCmCmGmAmGm | |
| | GGCACCGAGUCGGUGCUUUU | | UmCmGmGmUmGmCmU*mU*mU*mU | |
| G009854 | UACAGAAAAAGUCAGGAUAA | 207 | mU*mA*mC*AGAAAAAGUCAGGAUAAGUUUUAG | 240 |
| | GUUUUAGAGCUAGAAAUAGC | | AmGmCmUmAmGmAmAmAmUmAmGmCAAGUUAA | |
| | AAGUUAAAAUAAGGCUAGUC | | AAUAAGGCUAGUCCGUUAUCAmAmCmUmUmGm | |
| | CGUUAUCAACUUGAAAAAGU | | AmAmAmAmAmGmUmGmGmCmAmCmCmGmAmGm | |
| | GGCACCGAGUCGGUGCUUUU | | UmCmGmGmUmGmCmU*mU*mU*mU | |
| G009855 | UUUCUUCUGCCUUUAAACAG | 208 | mU*mU*mU*CUUCUGCCUUUAAACAGGUUUUAG | 241 |
| | GUUUUAGAGCUAGAAAUAGC | | AmGmCmUmAmGmAmAmAmUmAmGmCAAGUUAA | |
| | AAGUUAAAAUAAGGCUAGUC | | AAUAAGGCUAGUCCGUUAUCAmAmCmUmUmGm | |
| | CGUUAUCAACUUGAAAAAGU | | AmAmAmAmAmGmUmGmGmCmAmCmCmGmAmGm | |
| | GGCACCGAGUCGGUGCUUUU | | UmCmGmGmUmGmCmU*mU*mU*mU | |
| G009856 | UUAUAGUUUUAUAUUCAAAC | 209 | mU*mU*mA*UAGUUUUAUAUUCAAACGUUUUAG | 242 |
| | GUUUUAGAGCUAGAAAUAGC | | AmGmCmUmAmGmAmAmAmUmAmGmCAAGUUAA | |
| | AAGUUAAAAUAAGGCUAGUC | | AAUAAGGCUAGUCCGUUAUCAmAmCmUmUmGm | |
| | CGUUAUCAACUUGAAAAAGU | | AmAmAmAmAmGmUmGmGmCmAmCmCmGmAmGm | |
| | GGCACCGAGUCGGUGCUUUU | | UmCmGmGmUmGmCmU*mU*mU*mU | |
| G009857 | AUUUAUGAGAUCAACAGCAC | 37* | mA*mU*mU*UAUGAGAUCAACAGCACGUUUUAG | 69* |
| | GUUUUAGAGCUAGAAAUAGC | | AmGmCmUmAmGmAmAmAmUmAmGmCAAGUUAA | |
| | AAGUUAAAAUAAGGCUAGUC | | AAUAAGGCUAGUCCGUUAUCAmAmCmUmUmGm | |
| | CGUUAUCAACUUGAAAAAGU | | AmAmAmAmAmGmUmGmGmCmAmCmCmGmAmGm | |
| | GGCACCGAGUCGGUGCUUUU | | UmCmGmGmUmGmCmU*mU*mU*mU | |
| G009858 | GAUCAACAGCACAGGUUUUG | 38* | mG*mA*mU*CAACAGCACAGGUUUUGGUUUUAG | 70* |
| | GUUUUAGAGCUAGAAAUAGC | | AmGmCmUmAmGmAmAmAmUmAmGmCAAGUUAA | |
| | AAGUUAAAAUAAGGCUAGUC | | AAUAAGGCUAGUCCGUUAUCAmAmCmUmUmGm | |
| | CGUUAUCAACUUGAAAAAGU | | AmAmAmAmAmGmUmGmGmCmAmCmCmGmAmGm | |
| | GGCACCGAGUCGGUGCUUUU | | UmCmGmGmUmGmCmU*mU*mU*mU | |
| G009859 | UUAAAUAAAGCAUAGUGCAA | 39* | mU*mU*mA*AAUAAAGCAUAGUGCAAGUUUUAG | 71* |
| | GUUUUAGAGCUAGAAAUAGC | | AmGmCmUmAmGmAmAmAmUmAmGmCAAGUUAA | |
| | AAGUUAAAAUAAGGCUAGUC | | AAUAAGGCUAGUCCGUUAUCAmAmCmUmUmGm | |
| | CGUUAUCAACUUGAAAAAGU | | AmAmAmAmAmGmUmGmGmCmAmCmCmGmAmGm | |
| | GGCACCGAGUCGGUGCUUUU | | UmCmGmGmUmGmCmU*mU*mU*mU | |
| G009860 | UAAAGCAUAGUGCAAUGGAU | 40* | mU*mA*mA*AGCAUAGUGCAAUGGAUGUUUUAG | 72* |
| | GUUUUAGAGCUAGAAAUAGC | | AmGmCmUmAmGmAmAmAmUmAmGmCAAGUUAA | |
| | AAGUUAAAAUAAGGCUAGUC | | AAUAAGGCUAGUCCGUUAUCAmAmCmUmUmGm | |
| | CGUUAUCAACUUGAAAAAGU | | AmAmAmAmAmGmUmGmGmCmAmCmCmGmAmGm | |
| | GGCACCGAGUCGGUGCUUUU | | UmCmGmGmUmGmCmU*mU*mU*mU | |
| G009861 | UAGUGCAAUGGAUAGGUCUU | 41* | mU*mA*mG*UGCAAUGGAUAGGUCUUGUUUUAG | 73* |
| | GUUUUAGAGCUAGAAAUAGC | | AmGmCmUmAmGmAmAmAmUmAmGmCAAGUUAA | |
| | AAGUUAAAAUAAGGCUAGUC | | AAUAAGGCUAGUCCGUUAUCAmAmCmUmUmGm | |
| | CGUUAUCAACUUGAAAAAGU | | AmAmAmAmAmGmUmGmGmCmAmCmCmGmAmGm | |
| | GGCACCGAGUCGGUGCUUUU | | UmCmGmGmUmGmCmU*mU*mU*mU | |
| G009862 | AGUGCAAUGGAUAGGUCUUA | 215 | mA*mG*mU*GCAAUGGAUAGGUCUUAGUUUUAG | 248 |
| | GUUUUAGAGCUAGAAAUAGC | | AmGmCmUmAmGmAmAmAmUmAmGmCAAGUUAA | |
| | AAGUUAAAAUAAGGCUAGUC | | AAUAAGGCUAGUCCGUUAUCAmAmCmUmUmGm | |
| | CGUUAUCAACUUGAAAAAGU | | AmAmAmAmAmGmUmGmGmCmAmCmCmGmAmGm | |
| | GGCACCGAGUCGGUGCUUUU | | UmCmGmGmUmGmCmU*mU*mU*mU | |
| G009863 | UUACUUUGCACUUUCCUUAG | 216 | mU*mU*mA*CUUUGCACUUUCCUUAGGUUUUAG | 249 |
| | GUUUUAGAGCUAGAAAUAGC | | AmGmCmUmAmGmAmAmAmUmAmGmCAAGUUAA | |
| | AAGUUAAAAUAAGGCUAGUC | | AAUAAGGCUAGUCCGUUAUCAmAmCmUmUmGm | |
| | CGUUAUCAACUUGAAAAAGU | | AmAmAmAmAmGmUmGmGmCmAmCmCmGmAmGm | |
| | GGCACCGAGUCGGUGCUUUU | | UmCmGmGmUmGmCmU*mU*mU*mU | |
| G009864 | UACUUUGCACUUUCCUUAGU | 217 | mU*mA*mC*UUUGCACUUUCCUUAGUGUUUUAG | 250 |
| | GUUUUAGAGCUAGAAAUAGC | | AmGmCmUmAmGmAmAmAmUmAmGmCAAGUUAA | |
| | AAGUUAAAAUAAGGCUAGUC | | AAUAAGGCUAGUCCGUUAUCAmAmCmUmUmGm | |
| | CGUUAUCAACUUGAAAAAGU | | AmAmAmAmAmGmUmGmGmCmAmCmCmGmAmGm | |
| | GGCACCGAGUCGGUGCUUUU | | UmCmGmGmUmGmCmU*mU*mU*mU | |
| G009865 | UCUGACCUUUUAUUUUACCU | 218 | mU*mC*mU*GACCUUUUAUUUUACCUGUUUUAG | 251 |
| | GUUUUAGAGCUAGAAAUAGC | | AmGmCmUmAmGmAmAmAmUmAmGmCAAGUUAA | |
| | AAGUUAAAAUAAGGCUAGUC | | AAUAAGGCUAGUCCGUUAUCAmAmCmUmUmGm | |
| | CGUUAUCAACUUGAAAAAGU | | AmAmAmAmAmGmUmGmGmCmAmCmCmGmAmGm | |
| | GGCACCGAGUCGGUGCUUUU | | UmCmGmGmUmGmCmU*mU*mU*mU | |
| G009866 | UACUAAAACUUUAUUUUACU | 42* | mU*mA*mC*UAAAACUUUAUUUUACUGUUUUAG | 74* |
| | GUUUUAGAGCUAGAAAUAGC | | AmGmCmUmAmGmAmAmAmUmAmGmCAAGUUAA | |
| | AAGUUAAAAUAAGGCUAGUC | | AAUAAGGCUAGUCCGUUAUCAmAmCmUmUmGm | |
| | CGUUAUCAACUUGAAAAAGU | | AmAmAmAmAmGmUmGmGmCmAmCmCmGmAmGm | |
| | GGCACCGAGUCGGUGCUUUU | | UmCmGmGmUmGmCmU*mU*mU*mU | |
| G009867 | AAAGUUGAACAAUAGAAAAA | 43* | mA*mA*mA*GUUGAACAAUAGAAAAAGUUUUAG | 75* |
| | GUUUUAGAGCUAGAAAUAGC | | AmGmCmUmAmGmAmAmAmUmAmGmCAAGUUAA | |
| | AAGUUAAAAUAAGGCUAGUC | | AAUAAGGCUAGUCCGUUAUCAmAmCmUmUmGm | |
| | CGUUAUCAACUUGAAAAAGU | | AmAmAmAmAmGmUmGmGmCmAmCmCmGmAmGm | |
| | GGCACCGAGUCGGUGCUUUU | | UmCmGmGmUmGmCmU*mU*mU*mU | |
| G009868 | AAUGCAUAAUCUAAGUCAAA | 44* | mA*mA*mU*GCAUAAUCUAAGUCAAAGUUUUAG | 76* |
| | GUUUUAGAGCUAGAAAUAGC | | AmGmCmUmAmGmAmAmAmUmAmGmCAAGUUAA | |
| | AAGUUAAAAUAAGGCUAGUC | | AAUAAGGCUAGUCCGUUAUCAmAmCmUmUmGm | |
| | CGUUAUCAACUUGAAAAAGU | | AmAmAmAmAmGmUmGmGmCmAmCmCmGmAmGm | |
| | GGCACCGAGUCGGUGCUUUU | | UmCmGmGmUmGmCmU*mU*mU*mU | |
| G009869 | AUUAUCCUGACUUUUUCUGU | 222 | mA*mU*mU*AUCCUGACUUUUUCUGUGUUUUAG | 255 |
| | GUUUUAGAGCUAGAAAUAGC | | AmGmCmUmAmGmAmAmAmUmAmGmCAAGUUAA | |
| | AAGUUAAAAUAAGGCUAGUC | | AAUAAGGCUAGUCCGUUAUCAmAmCmUmUmGm | |
| | CGUUAUCAACUUGAAAAAGU | | AmAmAmAmAmGmUmGmGmCmAmCmCmGmAmGm | |
| | GGCACCGAGUCGGUGCUUUU | | UmCmGmGmUmGmCmU*mU*mU*mU | |
| G009870 | UGAAUUAUUCCUCUGUUUAA | 223 | mU*mG*mA*AUUAUUCCUCUGUUUAAGUUUUAG | 256 |
| | GUUUUAGAGCUAGAAAUAGC | | AmGmCmUmAmGmAmAmAmUmAmGmCAAGUUAA | |
| | AAGUUAAAAUAAGGCUAGUC | | AAUAAGGCUAGUCCGUUAUCAmAmCmUmUmGm | |
| | CGUUAUCAACUUGAAAAAGU | | AmAmAmAmAmGmUmGmGmCmAmCmCmGmAmGm | |
| | GGCACCGAGUCGGUGCUUUU | | UmCmGmGmUmGmCmU*mU*mU*mU | |
| G009871 | UAAUUUUCUUUUGCCCACUA | 224 | mU*mA*mA*UUUUCUUUUGCCCACUAGUUUUAG | 257 |
| | GUUUUAGAGCUAGAAAUAGC | | AmGmCmUmAmGmAmAmAmUmAmGmCAAGUUAA | |
| | AAGUUAAAAUAAGGCUAGUC | | AAUAAGGCUAGUCCGUUAUCAmAmCmUmUm | |
| | CGUUAUCAACUUGAAAAAGU | | GmAmAmAmAmAmGmUmGmGmCmAmCmCmGm | |
| | GGCACCGAGUCGGUGCUUUU | | AmGmUmCmGmGmUmGmCmU*mU*mU*mU | |
| G009872 | AAAAGGUCAGAAUUGUUUAG | 225 | mA*mA*mA*AGGUCAGAAUUGUUUAGGUUUUAG | 258 |
| | GUUUUAGAGCUAGAAAUAGC | | AmGmCmUmAmGmAmAmAmUmAmGmCAAGUUAA | |
| | AAGUUAAAAUAAGGCUAGUC | | AAUAAGGCUAGUCCGUUAUCAmAmCmUmUmGm | |
| | CGUUAUCAACUUGAAAAAGU | | AmAmAmAmAmGmUmGmGmCmAmCmCmGmAmGm | |
| | GGCACCGAGUCGGUGCUUUU | | UmCmGmGmUmGmCmU*mU*mU*mU | |
| G009873 | AACAUCCUAGGUAAAAUAAA | 226 | mA*mA*mC*AUCCUAGGUAAAAUAAAGUUUUAG | 259 |
| | GUUUUAGAGCUAGAAAUAGC | | AmGmCmUmAmGmAmAmAmUmAmGmCAAGUUAA | |
| | AAGUUAAAAUAAGGCUAGUC | | AAUAAGGCUAGUCCGUUAUCAmAmCmUmUmGm | |
| | CGUUAUCAACUUGAAAAAGU | | AmAmAmAmAmGmUmGmGmCmAmCmCmGmAmGm | |
| | GGCACCGAGUCGGUGCUUUU | | UmCmGmGmUmGmCmU*mU*mU*mU | |
| G009874 | UAAUAAAAUUCAAACAUCCU | 45* | mU*mA*mA*UAAAAUUCAAACAUCCUGUUUUAG | 77* |
| | GUUUUAGAGCUAGAAAUAGC | | AmGmCmUmAmGmAmAmAmUmAmGmCAAGUUAA | |
| | AAGUUAAAAUAAGGCUAGUC | | AAUAAGGCUAGUCCGUUAUCAmAmCmUmUmGm | |
| | CGUUAUCAACUUGAAAAAGU | | AmAmAmAmAmGmUmGmGmCmAmCmCmGmAmGm | |
| | GGCACCGAGUCGGUGCUUUU | | UmCmGmGmUmGmCmU*mU*mU*mU | |
| G009875 | UUGUCAUGUAUUUCUAAAAU | 228 | mU*mU*mG*UCAUGUAUUUCUAAAAUGUUUUAG | 261 |
| | GUUUUAGAGCUAGAAAUAGC | | AmGmCmUmAmGmAmAmAmUmAmGmCAAGUUAA | |
| | AAGUUAAAAUAAGGCUAGUC | | AAUAAGGCUAGUCCGUUAUCAmAmCmUmUmGm | |
| | CGUUAUCAACUUGAAAAAGU | | AmAmAmAmAmGmUmGmGmCmAmCmCmGmAmGm | |
| | GGCACCGAGUCGGUGCUUUU | | UmCmGmGmUmGmCmU*mU*mU*mU | |
| | UUUGUCAUGUAUUUCUAAAA | 229 | mU*mU*mU*GUCAUGUAUUUCUAAAAGUUUUAG | 262 |
| | GUUUUAGAGCUAGAAAUAGC | | AmGmCmUmAmGmAmAmAmUmAmGmCAAGUUAA | |
| | AAGUUAAAAUAAGGCUAGUC | | AAUAAGGCUAGUCCGUUAUCAmAmCmUmUmGm | |
| G009876 | CGUUAUCAACUUGAAAAAGU | | AmAmAmAmAmGmUmGmGmCmAmCmCmGmAmGm | |
| | GGCACCGAGUCGGUGCUUUU | | UmCmGmGmUmGmCmU*mU*mU*mU | |

SEQ ID NOs marked with an “*” above indicate that the indicated sgRNA is applicable to both cyno and human.

TABLE 8
sgRNA and Modifications

| Guide | Target site | Unmodified | Modified |
|---|---|---|---|
| G000409 | ACUCACGAUGA | ACUCACGAUGAAA | mA*mC*mU*CACGAUGAAAUCCUGGAGUU |
| | AAUCCUGGA | UCCUGGAGUUUUA | UUAGAmGmCmUmAmGmAmAmAmUmAmG |
| | SEQ ID NO: 1129 | GAGCUAGAAAUAG | mCAAGUUAAAAUAAGGCUAGUCCGUUAU |
| | | CAAGUUAAAAUAA | CAmAmCmUmUmGmAmAmAmAmAmGmUm |
| | | GGCUAGUCCGUUA | GmGmCmAmCmCmGmAmGmUmCmGmGmU |
| | | UCAACUUGAAAAA | mGmCmU*mU*mU*mU |
| | | GUGGCACCGAGUC | (SEQ ID NO: 1133) |
| | | GGUGCUUUU | |
| | | (SEQ ID NO: 1132) | |
| G000414 | CAACCUCACGG | CAACCUCACGGAG | mC*mA*mA*CCUCACGGAGAUUCCGGGUU |
| | AGAUUCCGG | AUUCCGGGUUUUA | UUAGAmGmCmUmAmGmAmAmAmUmAmG |
| | (SEQ ID NO: 1130) | GAGCUAGAAAUAG | mCAAGUUAAAAUAAGGCUAGUCCGUUAU |
| | | CAAGUUAAAAUAA | CAmAmCmUmUmGmAmAmAmAmAmGmUm |
| | | GGCUAGUCCGUUA | GmGmCmAmCmCmGmAmGmUmCmGmGmU |
| | | UCAACUUGAAAAA | mGmCmU*mU*mU*mU |
| | | GUGGCACCGAGUC | (SEQ ID NO: 1135) |
| | | GGUGCUUUU | |
| | | (SEQ ID NO: 1134) | |
| G000415 | UGUUGGACUGG | UGUUGGACUGGUG | mU*mG*mU*UGGACUGGUGUGCCAGCGUU |
| | UGUGCCAGC | UGCCAGCGUUUUA | UUAGAmGmCmUmAmGmAmAmAmUmAmG |
| | (SEQ ID NO: 1131) | GAGCUAGAAAUAG | mCAAGUUAAAAUAAGGCUAGUCCGUUAU |
| | | CAAGUUAAAAUAA | CAmAmCmUmUmGmAmAmAmAmAmGmUm |
| | | GGCUAGUCCGUUA | GmGmCmAmCmCmGmAmGmUmCmGmGmU |
| | | UCAACUUGAAAAA | mGmCmU*mU*mU*mU |
| | | GUGGCACCGAGUC | (SEQ ID NO: 1137) |
| | | GGUGCUUUU | |
| | | (SEQ ID NO: 1136) | |

SEQ ID NOs marked with an “*” above indicate that the indicated sgRNA is applicable to both cynomolgus and human.

[0160] The albumin or SERPINA1 guide RNA may further comprise a trRNA. In each composition and method embodiment described herein, the crRNA and trRNA may be associated as a single RNA (sgRNA) or may be on separate RNAs (dgRNA). In the context of sgRNAs, the crRNA and trRNA components may be covalently linked, e.g., via a phosphodiester bond or other covalent bond. In some embodiments, the sgRNA comprises one or more linkages between nucleotides that is not a phosphodiester linkage.

[0161] In each of the composition, use, and method embodiments described herein, the guide RNA may comprise two RNA molecules as a “dual guide RNA” or “dgRNA”. The dgRNA comprises a first RNA molecule comprising a crRNA comprising, e.g., a guide sequence shown in Table 1 or Table 2, and a second RNA molecule comprising a trRNA. The first and second RNA molecules may not be covalently linked, but may form an RNA duplex via the base pairing between portions of the crRNA and the trRNA.

[0162] In each of the composition, use, and method embodiments described herein, the guide RNA (albumin gRNA or SERPINA1 gRNA) may comprise a single RNA molecule as a “single guide RNA” or “sgRNA”. The sgRNA may comprise a crRNA (or a portion thereof) comprising a guide sequence shown in Table 1 or Table 2 covalently linked to a trRNA. The sgRNA may comprise 15, 16, 17, 18, 19, or 20 contiguous nucleotides of a guide sequence shown in Table 1 or Table 2. In some embodiments, the crRNA and the trRNA are covalently linked via a linker. In some embodiments, the sgRNA forms a stem-loop structure via the base pairing between portions of the crRNA and the trRNA. In some embodiments, the crRNA and the trRNA are covalently linked via one or more bonds that are not a phosphodiester bond. In some embodiments, the guide RNA comprises a sgRNA shown in any one of SEQ ID No: 34-67 or 120-163. In some embodiments, the guide RNA comprises a sgRNA comprising any one of the guide sequences of SEQ ID No: 2-33, 98-119, 165-170, 172, 174-176, 182-185, 189-193, 195-193, 195, or 196 and the nucleotides of SEQ ID No: 901 or 902, wherein the nucleotides of SEQ ID No: 901 or 902 are on the 3′ end of the guide sequence, and wherein the sgRNA may be modified as shown in Tables 9, 11, or 13 or SEQ ID NO: 300.

[0163] In some embodiments, the trRNA may comprise all or a portion of a trRNA sequence derived from a naturally-occurring CRISPR/Cas system. In some embodiments, the trRNA comprises a truncated or modified wild type trRNA. The length of the trRNA depends on the CRISPR/Cas system used. In some embodiments, the trRNA comprises or consists of 5, 6, 7, 8, 9, 10, 11, 12, 13, 14, 15, 16, 17, 18, 19, 20, 25, 30, 40, 50, 60, 70, 80, 90, 100, or more than 100 nucleotides. In some embodiments, the trRNA may comprise certain secondary structures, such as, for example, one or more hairpin or stem-loop structures, or one or more bulge structures.

[0164] In some embodiments, a composition or formulation disclosed herein comprises an mRNA comprising an open reading frame (ORF) encoding an RNA-guided DNA binding agent, such as a Cas nuclease as described herein. In some embodiments, an mRNA comprising an ORF encoding an RNA-guided DNA binding agent, such as a Cas nuclease, is provided, used, or administered.

C. Modified gRNAs and mRNAs

[0165] In some embodiments, the gRNA disclosed herein (e.g., albumin or SERPINA1 gRNA) is chemically modified. A gRNA comprising one or more modified nucleosides or nucleotides is called a “modified” gRNA or “chemically modified” gRNA, to describe the presence of one or more non-naturally or naturally occurring components or configurations that are used instead of or in addition to the canonical A, G, C, and U residues. In some embodiments, a modified gRNA is synthesized with a non-canonical nucleoside or nucleotide, is here called “modified.” Modified nucleosides and nucleotides can include one or more of: (i) alteration, e.g., replacement, of one or both of the non-linking phosphate oxygens or of one or more of the linking phosphate oxygens in the phosphodiester backbone linkage (an exemplary backbone modification); (ii) alteration, e.g., replacement, of a constituent of the ribose sugar, e.g., of the 2′ hydroxyl on the ribose sugar (an exemplary sugar modification); (iii) wholesale replacement of the phosphate moiety with “dephospho” linkers (an exemplary backbone modification); (iv) modification or replacement of a naturally occurring nucleobase, including with a non-canonical nucleobase (an exemplary base modification); (v) replacement or modification of the ribose-phosphate backbone (an exemplary backbone modification); (vi) modification of the 3′ end or 5′ end of the oligonucleotide, e.g., removal, modification or replacement of a terminal phosphate group or conjugation of a moiety, cap or linker (such 3′ or 5′ cap modifications may comprise a sugar or backbone modification); and (vii) modification or replacement of the sugar (an exemplary sugar modification).

[0166] Chemical modifications such as those listed above can be combined to provide modified gRNAs or mRNAs comprising nucleosides and nucleotides (collectively “residues”) that can have two, three, four, or more modifications. For example, a modified residue can have a modified sugar and a modified nucleobase. In some embodiments, every base of a gRNA is modified, e.g., all bases have a modified phosphate group, such as a phosphorothioate group. In certain embodiments, all, or substantially all, of the phosphate groups of an gRNA molecule are replaced with phosphorothioate groups. In some embodiments, modified gRNAs comprise at least one modified residue at or near the 5′ end of the RNA. In some embodiments, modified gRNAs comprise at least one modified residue at or near the 3′ end of the RNA.

[0167] In some embodiments, the gRNA comprises one, two, three or more modified residues. In some embodiments, at least 5% (e.g., at least 5%, at least 10%, at least 15%, at least 20%, at least 25%, at least 30%, at least 35%, at least 40%, at least 45%, at least 50%, at least 55%, at least 60%, at least 65%, at least 70%, at least 75%, at least 80%, at least 85%, at least 90%, at least 95%, or 100%) of the positions in a modified gRNA are modified nucleosides or nucleotides.

[0168] Unmodified nucleic acids can be prone to degradation by, e.g., intracellular nucleases or those found in serum. For example, nucleases can hydrolyze nucleic acid phosphodiester bonds. Accordingly, in one aspect the gRNAs described herein can contain one or more modified nucleosides or nucleotides, e.g., to introduce stability toward intracellular or serum-based nucleases. In some embodiments, the modified gRNA molecules described herein can exhibit a reduced innate immune response when introduced into a population of cells, both in vivo and ex vivo. The term “innate immune response” includes a cellular response to exogenous nucleic acids, including single stranded nucleic acids, which involves the induction of cytokine expression and release, particularly the interferons, and cell death.

[0169] In some embodiments of a backbone modification, the phosphate group of a modified residue can be modified by replacing one or more of the oxygens with a different substituent. Further, the modified residue, e.g., modified residue present in a modified nucleic acid, can include the wholesale replacement of an unmodified phosphate moiety with a modified phosphate group as described herein. In some embodiments, the backbone modification of the phosphate backbone can include alterations that result in either an uncharged linker or a charged linker with unsymmetrical charge distribution.

[0170] Examples of modified phosphate groups include, phosphorothioate, phosphoroselenates, borano phosphates, borano phosphate esters, hydrogen phosphonates, phosphoroamidates, alkyl or aryl phosphonates and phosphotriesters. The phosphorous atom in an unmodified phosphate group is achiral. However, replacement of one of the non-bridging oxygens with one of the above atoms or groups of atoms can render the phosphorous atom chiral. The stereogenic phosphorous atom can possess either the “R” configuration (herein Rp) or the “S” configuration (herein Sp). The backbone can also be modified by replacement of a bridging oxygen, (i.e., the oxygen that links the phosphate to the nucleoside), with nitrogen (bridged phosphoroamidates), sulfur (bridged phosphorothioates) and carbon (bridged methylenephosphonates). The replacement can occur at either linking oxygen or at both of the linking oxygens.

[0171] The phosphate group can be replaced by non-phosphorus containing connectors in certain backbone modifications. In some embodiments, the charged phosphate group can be replaced by a neutral moiety. Examples of moieties which can replace the phosphate group can include, without limitation, e.g., methyl phosphonate, hydroxylamino, siloxane, carbonate, carboxymethyl, carbamate, amide, thioether, ethylene oxide linker, sulfonate, sulfonamide, thioformacetal, formacetal, oxime, methyleneimino, methylenemethylimino, methylenehydrazo, methylenedimethylhydrazo and methyleneoxymethylimino.

[0172] Scaffolds that can mimic nucleic acids can also be constructed wherein the phosphate linker and ribose sugar are replaced by nuclease resistant nucleoside or nucleotide surrogates. Such modifications may comprise backbone and sugar modifications. In some embodiments, the nucleobases can be tethered by a surrogate backbone. Examples can include, without limitation, the morpholino, cyclobutyl, pyrrolidine and peptide nucleic acid (PNA) nucleoside surrogates.

[0173] The modified nucleosides and modified nucleotides can include one or more modifications to the sugar group, i.e. at sugar modification. For example, the 2′ hydroxyl group (OH) can be modified, e.g. replaced with a number of different “oxy” or “deoxy” substituents. In some embodiments, modifications to the 2′ hydroxyl group can enhance the stability of the nucleic acid since the hydroxyl can no longer be deprotonated to form a 2′-alkoxide ion.

[0174] Examples of 2′ hydroxyl group modifications can include alkoxy or aryloxy (OR, wherein “R” can be, e.g., alkyl, cycloalkyl, aryl, aralkyl, heteroaryl or a sugar); polyethyleneglycols (PEG), O(CH₂CH₂O)ₙCH₂CH₂OR wherein R can be, e.g., H or optionally substituted alkyl, and n can be an integer from 0 to 20 (e.g., from 0 to 4, from 0 to 8, from 0 to 10, from 0 to 16, from 1 to 4, from 1 to 8, from 1 to 10, from 1 to 16, from 1 to 20, from 2 to 4, from 2 to 8, from 2 to 10, from 2 to 16, from 2 to 20, from 4 to 8, from 4 to 10, from 4 to 16, and from 4 to 20). In some embodiments, the 2′ hydroxyl group modification can be 2′-O-Me. In some embodiments, the 2′ hydroxyl group modification can be a 2′-fluoro modification, which replaces the 2′ hydroxyl group with a fluoride. In some 25 embodiments, the 2′ hydroxyl group modification can include “locked” nucleic acids (LNA) in which the 2′ hydroxyl can be connected, e.g., by a C₁₋₆ alkylene or C₁₋₆ heteroalkylene bridge, to the 4′ carbon of the same ribose sugar, where exemplary bridges can include methylene, propylene, ether, or amino bridges; O-amino (wherein amino can be, e.g., NH₂; alkylamino, dialkylamino, heterocyclyl, arylamino, diarylamino, heteroarylamino, or diheteroarylamino, ethylenediamine, or polyamino) and aminoalkoxy, O(CH₂)ₙ-amino, (wherein amino can be, e.g., NH₂; alkylamino, dialkylamino, heterocyclyl, arylamino, diarylamino, heteroarylamino, or diheteroarylamino, ethylenediamine, or polyamino). In some embodiments, the 2′ hydroxyl group modification can include “unlocked” nucleic acids (UNA) in which the ribose ring lacks the C2′—C3′ bond. In some embodiments, the 2′ hydroxyl group modification can include the methoxyethyl group (MOE), (OCH₂CH₂OCH₃, e.g., a PEG derivative).

[0175] “Deoxy” 2′ modifications can include hydrogen (i.e. deoxyribose sugars, e.g., at the overhang portions of partially dsRNA); halo (e.g., bromo, chloro, fluoro, or iodo); amino (wherein amino can be, e.g., NH₂; alkylamino, dialkylamino, heterocyclyl, arylamino, diarylamino, heteroarylamino, diheteroarylamino, or amino acid); NH(CH₂CH₂NH)ₙCH₂CH₂— amino (wherein amino can be, e.g., as described herein), —NHC(O)R (wherein R can be, e.g., alkyl, cycloalkyl, aryl, aralkyl, heteroaryl or sugar), cyano; mercapto; alkyl-thio-alkyl; thioalkoxy; and alkyl, cycloalkyl, aryl, alkenyl and alkynyl, which may be optionally substituted with e.g., an amino as described herein.

[0176] The sugar modification can comprise a sugar group which may also contain one or more carbons that possess the opposite stereochemical configuration than that of the corresponding carbon in ribose. Thus, a modified nucleic acid can include nucleotides containing e.g., arabinose, as the sugar. The modified nucleic acids can also include abasic sugars. These abasic sugars can also be further modified at one or more of the constituent sugar atoms. The modified nucleic acids can also include one or more sugars that are in the L form, e.g. L-nucleosides.

[0177] The modified nucleosides and modified nucleotides described herein, which can be incorporated into a modified nucleic acid, can include a modified base, also called a nucleobase. Examples of nucleobases include, but are not limited to, adenine (A), guanine (G), cytosine (C), and uracil (U). These nucleobases can be modified or wholly replaced to provide modified residues that can be incorporated into modified nucleic acids. The nucleobase of the nucleotide can be independently selected from a purine, a pyrimidine, a purine analog, or pyrimidine analog. In some embodiments, the nucleobase can include, for example, naturally-occurring and synthetic derivatives of a base.

[0178] In embodiments employing a dual guide RNA, each of the crRNA and the tracr RNA can contain modifications. Such modifications may be at one or both ends of the crRNA or tracr RNA. In embodiments comprising an sgRNA, one or more residues at one or both ends of the sgRNA may be chemically modified, or internal nucleosides may be modified, or the entire sgRNA may be chemically modified. Certain embodiments comprise a 5′ end modification. Certain embodiments comprise a 3′ end modification.

[0179] In some embodiments, the guide RNAs disclosed herein comprise one of the modification patterns disclosed in WO2018/107028 A1, filed Dec. 8, 2017, titled “Chemically Modified Guide RNAs,” the contents of which are hereby incorporated by reference in their entirety. In some embodiments, the guide RNAs disclosed herein comprise one of the structures/modification patterns disclosed in US20170114334, the contents of which are hereby incorporated by reference in their entirety. In some embodiments, the guide RNAs disclosed herein comprise one of the structures/modification patterns disclosed in WO2017/136794, WO2017004279, US2018187186, US2019048338, the contents of which are hereby incorporated by reference in their entirety.

[0180] In some embodiments, the modified sgRNA comprises the following sequence: mN*mN*mN*NNNNNNNNNNNNNNNNNGUUUUAGAmGmCmUmAmGmAmAmAmU mAmGmCAAGUUAAAAUAAGGCUAGUCCGUUAUCAmAmCmUmUmGmAmAmAm AmAmGmUmGmGmCmAmCmCmGmAmGmUmCmGmGmUmGmCmU*mU*mU*mU (SEQ ID NO: 300), where “N” may be any natural or non-natural nucleotide, and wherein the totality of N's comprise an albumin intron 1 guide sequence as described in Table 1; and SERPINA1 guide sequences as described in Table 2. For example, encompassed herein is SEQ ID NO: 300, where the N's are replaced with any of the guide sequences disclosed herein in Table 1 (SEQ ID Nos: 2-33) or Table 2 (SEQ ID Nos: 1000-1131).

[0181] Any of the modifications described below may be present in the gRNAs and mRNAs described herein.

[0182] The terms “mA,” “mC,” “mU,” or “mG” may be used to denote a nucleotide that has been modified with 2′-O-Me.

[0183] Modification of 2′-O-methyl can be depicted as follows:

[chemical structure]

[0184] Another chemical modification that has been shown to influence nucleotide sugar rings is halogen substitution. For example, 2′-fluoro (2′-F) substitution on nucleotide sugar rings can increase oligonucleotide binding affinity and nuclease stability.

[0185] In this application, the terms “fA,” “fC,” “fU,” or “fG” may be used to denote a nucleotide that has been substituted with 2′-F.

[0186] Substitution of 2′-F can be depicted as follows:

[chemical structure]

[0187] Phosphorothioate (PS) linkage or bond refers to a bond where a sulfur is substituted for one nonbridging phosphate oxygen in a phosphodiester linkage, for example in the bonds between nucleotides bases. When phosphorothioates are used to generate oligonucleotides, the modified oligonucleotides may also be referred to as S-oligos.

[0188] A “*” may be used to depict a PS modification. In this application, the terms A*, C*, U*, or G* may be used to denote a nucleotide that is linked to the next (e.g., 3′) nucleotide with a PS bond.

[0189] In this application, the terms “mA*,” “mC*,” “mU*,” or “mG*” may be used to denote a nucleotide that has been substituted with 2′-O-Me and that is linked to the next (e.g., 3′) nucleotide with a PS bond.

[0190] The diagram below shows the substitution of S— into a nonbridging phosphate oxygen, generating a PS bond in lieu of a phosphodiester bond:

[chemical structure]

[0191] Abasic nucleotides refer to those which lack nitrogenous bases. The figure below depicts an oligonucleotide with an abasic (also known as apurinic) site that lacks a base:

[chemical structure]

[0192] Inverted bases refer to those with linkages that are inverted from the normal 5′ to 3′ linkage (i.e., either a 5′ to 5′ linkage or a 3′ to 3′ linkage). For example:

[chemical structure]

[0193] An abasic nucleotide can be attached with an inverted linkage. For example, an abasic nucleotide may be attached to the terminal 5′ nucleotide via a 5′ to 5′ linkage, or an abasic nucleotide may be attached to the terminal 3′ nucleotide via a 3′ to 3′ linkage. An inverted 10 abasic nucleotide at either the terminal 5′ or 3′ nucleotide may also be called an inverted abasic end cap.

[0194] In some embodiments, one or more of the first three, four, or five nucleotides at the 5′ terminus, and one or more of the last three, four, or five nucleotides at the 3′ terminus are modified. In some embodiments, the modification is a 2′-O-Me, 2′-F, inverted abasic 15 nucleotide, PS bond, or other nucleotide modification well known in the art to increase stability or performance.

[0195] In some embodiments, the first four nucleotides at the 5′ terminus, and the last four nucleotides at the 3′ terminus are linked with phosphorothioate (PS) bonds.

[0196] In some embodiments, the first three nucleotides at the 5′ terminus, and the last three nucleotides at the 3′ terminus comprise a 2′-O-methyl (2′-O-Me) modified nucleotide. In some embodiments, the first three nucleotides at the 5′ terminus, and the last three nucleotides at the 3′ terminus comprise a 2′-fluoro (2′-F) modified nucleotide. In some embodiments, the first three nucleotides at the 5′ terminus, and the last three nucleotides at the 3′ terminus comprise an inverted abasic nucleotide.

[0197] In some embodiments, any of the guide RNAs disclosed herein comprises a modified sgRNA. In some embodiments, the sgRNA comprises the modification pattern shown in SEQ ID NO: 200, where N is any natural or non-natural nucleotide, and where the totality of the N's comprise a guide sequence (e.g., as shown in Table 1 or Table 2) that directs a nuclease to a target sequence (e.g., in human albumin intron 1 or SERPINA1).

[0198] As noted above, in some embodiments, a composition or formulation disclosed herein comprises an mRNA comprising an open reading frame (ORF) encoding an RNA-guided DNA binding agent, such as a Cas nuclease as described herein. In some embodiments, an mRNA comprising an ORF encoding an RNA-guided DNA binding agent, such as a Cas nuclease, is provided, used, or administered. As described below, the mRNA comprising a Cas nuclease may comprise a Cas9 nuclease, such as an S. pyogenes Cas9 nuclease having cleavase, nickase, or site-specific DNA binding activity. In some embodiments, the ORF encoding an RNA-guided DNA nuclease is a “modified RNA-guided DNA binding agent ORF” or simply a “modified ORF,” which is used as shorthand to indicate that the ORF is modified.

[0199] Cas9 ORFs, including modified Cas9 ORFs, are provided herein and are known in the art. As one example, the Cas9 ORF can be codon optimized, such that coding sequence includes one or more alternative codons for one or more amino acids. An “alternative codon” as used herein refers to variations in codon usage for a given amino acid, and may or may not be a preferred or optimized codon (codon optimized) for a given expression system. Preferred codon usage, or codons that are well-tolerated in a given system of expression, is known in the art. The Cas9 coding sequences, Cas9 mRNAs, and Cas9 protein sequences of WO2013/176772, WO2014/065596, WO2016/106121, and WO2019/067910 are hereby incorporated by reference. In particular, the ORFs and Cas9 amino acid sequences of the table at paragraph [0449] WO2019/067910, and the Cas9 mRNAs and ORFs of paragraphs [0214]-[0234] of WO2019/067910 are hereby incorporated by reference.

[0200] In some embodiments, the modified ORF may comprise a modified uridine at least at one, a plurality of, or all uridine positions. In some embodiments, the modified uridine is a uridine modified at the 5 position, e.g., with a halogen, methyl, or ethyl. In some embodiments, the modified uridine is a pseudouridine modified at the 1 position, e.g., with a halogen, methyl, or ethyl. The modified uridine can be, for example, pseudouridine, N1-methyl-pseudouridine, 5-methoxyuridine, 5-iodouridine, or a combination thereof. In some embodiments, the modified uridine is 5-methoxyuridine. In some embodiments, the modified uridine is 5-iodouridine. In some embodiments, the modified uridine is pseudouridine. In some embodiments, the modified uridine is N1-methyl-pseudouridine. In some embodiments, the modified uridine is a combination of pseudouridine and N1-methyl-pseudouridine. In some embodiments, the modified uridine is a combination of pseudouridine and 5-methoxyuridine. In some embodiments, the modified uridine is a combination of N1-methyl pseudouridine and 5-methoxyuridine. In some embodiments, the modified uridine is a combination of 5-iodouridine and N1-methyl-pseudouridine. In some embodiments, the modified uridine is a combination of pseudouridine and 5-iodouridine. In some embodiments, the modified uridine is a combination of 5-iodouridine and 5-methoxyuridine.

[0201] In some embodiments, an mRNA disclosed herein comprises a 5′ cap, such as a Cap0, Cap1, or Cap2. A 5′ cap is generally a 7-methylguanine ribonucleotide (which may be further modified, as discussed below e.g. with respect to ARCA) linked through a 5′-triphosphate to the 5′ position of the first nucleotide of the 5′-to-3′ chain of the mRNA, i.e., the first cap-proximal nucleotide. In Cap0, the riboses of the first and second cap-proximal nucleotides of the mRNA both comprise a 2′-hydroxyl. In Cap1, the riboses of the first and second transcribed nucleotides of the mRNA comprise a 2′-methoxy and a 2′-hydroxyl, respectively. In Cap2, the riboses of the first and second cap-proximal nucleotides of the mRNA both comprise a 2′-methoxy. See, e.g., Katibah et al. (2014) Proc Natl Acad Sci USA 111(33):12025-30; Abbas et al. (2017) Proc Natl Acad Sci USA 114(11):E2106-E2115. Most endogenous higher eukaryotic mRNAs, including mammalian mRNAs such as human mRNAs, comprise Cap1 or Cap2. Cap0 and other cap structures differing from Cap1 and Cap2 may be immunogenic in mammals, such as humans, due to recognition as “non-self” by components of the innate immune system such as IFIT-1 and IFIT-5, which can result in elevated cytokine levels including type I interferon. Components of the innate immune system such as IFIT-1 and IFIT-5 may also compete with eIF4E for binding of an mRNA with a cap other than Cap1 or Cap2, potentially inhibiting translation of the mRNA.

[0202] A cap can be included co-transcriptionally. For example, ARCA (anti-reverse cap analog; Thermo Fisher Scientific Cat. No. AM8045) is a cap analog comprising a 7-methylguanine 3′-methoxy-5′-triphosphate linked to the 5′ position of a guanine ribonucleotide which can be incorporated in vitro into a transcript at initiation. ARCA results in a Cap0 cap in which the 2′ position of the first cap-proximal nucleotide is hydroxyl. See, e.g., Stepinski et al., (2001) “Synthesis and properties of mRNAs containing the novel ‘anti-reverse’ cap analogs 7-methyl(3′-O-methyl)GpppG and 7-methyl(3′deoxy)GpppG,” RNA 7: 1486-1495. The ARCA structure is shown below.

[chemical structure]

[0203] CleanCap™ AG (m7G(5′)ppp(5′)(2′OMeA)pG; TriLink Biotechnologies Cat. No. N-7113) or CleanCap™ GG (m7G(5′)ppp(5′)(2′OMeG)pG; TriLink Biotechnologies Cat. No. N-7133) can be used to provide a Cap1 structure co-transcriptionally. 3′-O-methylated versions of CleanCap™ AG and CleanCap™ GG are also available from TriLink Biotechnologies as Cat. Nos. N-7413 and N-7433, respectively. The CleanCap™ AG structure is shown below.

[chemical structure]

[0204] Alternatively, a cap can be added to an RNA post-transcriptionally. For example, Vaccinia capping enzyme is commercially available (New England Biolabs Cat. No. M2080S) and has RNA triphosphatase and guanylyltransferase activities, provided by its D1 subunit, and guanine methyltransferase, provided by its D12 subunit. As such, it can add a 7-methylguanine to an RNA, so as to give Cap0, in the presence of S-adenosyl methionine and GTP. See, e.g., Guo, P. and Moss, B. (1990) Proc. Natl. Acad. Sci. USA 87, 4023-4027; Mao, X. and Shuman, S. (1994) J. Biol. Chem. 269, 24472-24479.

[0205] In some embodiments, the mRNA further comprises a poly-adenylated (poly-A) tail. In some embodiments, the poly-A tail comprises at least 20, 30, 40, 50, 60, 70, 80, 90, or 100 adenines, optionally up to 300 adenines. In some embodiments, the poly-A tail comprises 95, 96, 97, 98, 99, or 100 adenine nucleotides.

### D. Donor Constructs

[0206] The compositions and methods described herein include the use of a nucleic acid construct that comprises a sequence encoding a heterologous AAT gene (e.g., a functional or wild-type AAT) to be inserted into a cut site created by a guide RNA of the present disclosure and an RNA-guided DNA binding agent. In certain embodiments, the donor construct is a bidirectional nucleic acid construct provided herein. As used herein, such a construct is sometimes referred to as a “donor construct/template”. In some embodiments, the construct is a DNA construct. Methods of designing and making various functional/structural modifications to donor constructs are known in the art. In some embodiments, the construct may comprise any one or more of a polyadenylation tail sequence, a polyadenylation signal sequence, splice acceptor site, or selectable marker. In some embodiments, the polyadenylation tail sequence is encoded, e.g., as a “poly-A” stretch, at the 3′ end of the coding sequence. Methods of designing a suitable polyadenylation tail sequence or polyadenylation signal sequence are well known in the art. For example, the polyadenylation signal sequence AAUAAA (SEQ ID NO: 800) is commonly used in mammalian systems, although variants such as UAUAAA (SEQ ID NO: 801) or AU/GUAAA (SEQ ID NO: 802) have been identified. See, e.g., NJ Proudfoot, Genes & Dev. 25(17):1770-82, 2011.

[0207] In embodiments, the donor construct is a bidirectional nucleic acid construct. In some embodiments, such constructs comprise: a) a first segment comprising a first alpha-1 antitrypsin (AAT) polypeptide coding sequence, wherein the codon usage of the first AAT polypeptide coding sequence is different from the codon usage of the SERPINA1 gene; and b) a second segment comprising a reverse complement of a second AAT polypeptide coding sequence wherein the codon usage of the second AAT polypeptide coding sequence is different from the codon usage of the first AAT polypeptide coding sequence, from the codon usage of the SERPINA1 gene. In some embodiments, the coding sequences of the first segment and the second segment are CpG depleted. In certain embodiments, the construct does not comprise a promoter that drives the expression of either the first AAT polypeptide coding sequence or the second AAT polypeptide coding sequence. In some embodiments, the second segment is 3′ of the first segment. In certain embodiments, the construct does not comprise a homology arm.

[0208] In some embodiments, the AAT polypeptide coding sequences of the bidirectional nucleic acid construct have codon usage that prevents or reduces the ability of a SERPINA1 targeting siRNA, dsRNA or guide RNA to target it.

[0209] In certain embodiments, both the first AAT polypeptide coding sequence of the bidirectional nucleic acid construct and the second AAT polypeptide coding sequence of the bidirectional nucleic acid construct includes the use of a non-wild type codon within the a region (or one or more regions) of the sequence corresponding to bases 409-431, 409-410, 412-431, 415-418, 506-528, 506-525, 519-522, 527-528, 538-560, 538-557, 551-554, 559-560, 957-977, 970-976, 1403-1436, 1403-1425, 1410-1436, 1418-1424, 1423-1435, or any combination thereof of SEQ ID NO:703.

[0210] In some embodiments, both the first AAT polypeptide coding sequence of the bidirectional nucleic acid construct and the second AAT polypeptide coding sequence of the bidirectional nucleic acid construct includes at least one, at least 2, or at least 3 mismatches (e.g., from 1-10 mismatches, from 1-9 mismatches, from 1-8 mismatches, from 1-7 mismatches, from 1-6 mismatches, from 1-5 mismatches, from 1-4 mismatches, from 1-3 mismatches, from 1-2 mismatches, 1 mismatch, from 2-10 mismatches, from 2-9 mismatches, from 2-8 mismatches, from 2-7 mismatches, from 2-6 mismatches, from 2-5 mismatches, from 2-4 mismatches, from 1-3 mismatches, 2 mismatches, from 3-10 mismatches, from 3-9 mismatches, from 3-8 mismatches, from 3-7 mismatches, from 3-6 mismatches, from 3-5 mismatches, from 3-4 mismatches, 3 mismatches, from 4-10 mismatches, from 4-9 mismatches, from 4-8 mismatches, from 4-7 mismatches, from 4-6 mismatches, from 4-5 mismatches, 4 mismatches, from 5-10 mismatches, from 5-9 mismatches, from 5-8 mismatches, from 5-7 mismatches, from 5-6 mismatches, 5 mismatches, from 6-10 mismatches, from 6-9 mismatches, from 6-8 mismatches, from 6-7 mismatches, 6 mismatches, from 7-10 mismatches, from 7-9 mismatches, from 7-8 mismatches, 7 mismatches, from 8-10 mismatches, from 8-9 mismatches, or 8 mismatches) from a wild-type SERPINA1 gene sequence within the region (or one or more regions) of the AAT polypeptide coding sequence corresponding to bases 409-431, 409-410, 412-431, 415-418, 506-528, 506-525, 519-522, 527-528, 538-560, 538-557, 551-554, 559-560, 957-977, 970-976, 1403-1436, 1403-1425, 1410-1436, 1418-1424, 1423-1435, or any combination thereof of SEQ ID NO: 703.

[0211] In some embodiments, neither the first AAT polypeptide coding sequence of the bidirectional nucleic acid construct nor the second AAT polypeptide coding sequence of the bidirectional nucleic acid construct is targeted by an RNAi agent targeted to nucleotides 957-977, 1403-1425, or 1410-1436 of SEQ ID NO: 703.

[0212] In certain embodiments, neither the first AAT polypeptide coding sequence of the bidirectional nucleic acid construct nor the second AAT polypeptide coding sequence of the bidirectional nucleic acid construct is targeted by a SERPINA1 targeting guide RNA having a targeting sequence of SEQ ID NOs: 1129, 1130, or 1131.

[0213] In some embodiments, both the first AAT polypeptide coding sequence of the bidirectional nucleic acid construct and the second AAT polypeptide coding sequence of the bidirectional nucleic acid construct includes the use of a non-wild type codon within the region (or one or more regions) of the sequence corresponding to bases 409-431, 409-410, 412-431, 415-418, 506-528, 506-525, 519-522, 527-528, 538-560, 538-557, 551-554, 559-560, 957-977, 970-976, 1403-1436, 1403-1425, 1410-1436, 1418-1424, 1423-1435, or any combination thereof of SEQ ID NO:703.

[0214] In certain embodiments, the first AAT polypeptide coding sequence of the bidirectional nucleic acid construct comprises a sequence selected from SEQ ID NOs: 711, 712, 721, 722, 731, 732, 741, 742, 751, 752, 761, 762, 771, 772, 781, 782, 791, 792, 796, and 797. In some embodiments, the second AAT polypeptide coding sequence of the bidirectional nucleic acid construct comprises a sequence selected from SEQ ID NOs: 711, 712, 721, 722, 731, 732, 741, 742, 751, 752, 761, 762, 771, 772, 781, 782, 791, 792, 796, and 797. In certain embodiments, the nucleic acid sequence of the bidirectional nucleic acid construct is selected from: SEQ ID NOs: 711, 712, 721, 722, 731, 732, 741, 742, 751, 752, 761, 762, 771, 772, 781, 782, 791, 792, 796, and 797.

[0215] The length of the construct can vary, depending on the size of the gene to be inserted, and can be, for example, from 200 base pairs (bp) to about 5000 bp, such as about 200 bp to about 2000 bp, such as about 500 bp to about 1500 bp. In some embodiments, the length of the DNA donor template is about 200 bp, or is about 500 bp, or is about 800 bp, or is about 1000 base pairs, or is about 1500 base pairs. In other embodiments, the length of the donor template is at least 200 bp, or is at least 500 bp, or is at least 800 bp, or is at least 1000 bp, or is at least 1500 bp, or at least 2000, or at least 2500, or at least 3000, or at least 3500, or at least 4000, or at least 4500, or at least 5000.

[0216] The construct can be DNA or RNA, single-stranded, double-stranded or partially single- and partially double-stranded and can be introduced into a host cell in linear or circular (e.g., minicircle) form. See, e.g., U.S. Patent Publication Nos. 2010/0047805, 2011/0281361, 2011/0207221. If introduced in linear form, the ends of the donor sequence can be protected (e.g., from exonucleolytic degradation) by methods known to those of skill in the art. For example, one or more dideoxynucleotide residues are added to the 3′ terminus of a linear molecule or self-complementary oligonucleotides are ligated to one or both ends. See, for example, Chang et al. (1987) Proc. Natl. Acad. Sci. USA 84:4959-4963; Nehls et al. (1996) Science 272:886-889. Additional methods for protecting exogenous polynucleotides from degradation include, but are not limited to, addition of terminal amino group(s) and the use of modified internucleotide linkages such as, for example, phosphorothioates, phosphoramidates, and O-methyl ribose or deoxyribose residues. A construct can be introduced into a cell as part of a vector molecule having additional sequences such as, for example, replication origins, promoters and genes encoding antibiotic resistance. A construct may omit viral elements. Moreover, donor constructs can be introduced as naked nucleic acid, as nucleic acid complexed with an agent such as a liposome or poloxamer, or can be delivered by viruses (e.g., adenovirus, AAV, herpesvirus, retrovirus, lentivirus).

[0217] In some embodiments, the construct may be inserted so that its expression is driven by the endogenous promoter at the insertion site (e.g., the endogenous albumin promoter when the donor is integrated into the host cell's albumin locus). In such cases, the transgene may lack control elements (e.g., promoter or enhancer) that drive its expression (e.g., a promoterless construct). Nonetheless, it will be apparent that in other cases the construct may comprise a promoter or enhancer, for example a constitutive promoter or an inducible or tissue specific (e.g., liver- or platelet-specific) promoter that drives expression of the functional protein upon integration. The construct may comprise a sequence encoding a heterologous AAT protein downstream of and operably linked to a signal sequence encoding a signal peptide. In some embodiments, the signal peptide is a signal peptide from a hepatocyte secreted protein. In some embodiments, the signal peptide is an AAT signal peptide. In some embodiments, the signal peptide is an albumin signal peptide. In some embodiments, the signal peptide is an Factor IX signal peptide. The construct may comprise a sequence encoding a heterologous AAT protein downstream of and operably linked to a signal sequence encoding an AAT signal peptide, e.g. SEQ ID NO: 700. The construct may comprise a sequence encoding a heterologous AAT protein downstream of and operably linked to a signal sequence encoding a heterologous signal peptide. In various embodiments, the methods comprise a sequence encoding a heterologous AAT protein downstream of and operably linked to a signal sequence encoding an albumin signal peptide. In some embodiments, the nucleic acid construct works in homology-independent insertion of a nucleic acid that encodes an AAT protein. In some embodiments, the nucleic acid construct works in non-dividing cells, e.g., cells in which NHEJ, not HR, is the primary mechanism by which double-stranded DNA breaks are repaired. The nucleic acid may be a homology-independent donor construct.

[0218] In some embodiments, the donor construct comprises a heterologous AAT gene that encodes a functional AAT protein. In some embodiments, the functional AAT protein is a human wild-type AAT protein sequence according to SEQ ID NO: 700. In some embodiments, the functional AAT protein is a human wild-type AAT protein sequence according to SEQ ID NO: 702. Nucleic acid encoding AAT are also exemplified and disclosed herein. In some embodiments, the construct comprises a heterologous AAT gene that encodes a functional variant of AAT, e.g., a variant that possesses increased protease inhibitor activity as compared to wild type AAT. In some embodiments, the construct comprises a heterologous AAT gene that encodes a functional variant that is 80%, 85%, 90%, 93%, 95%, 97%, 99% identical to SEQ ID NO: 700, having a functional activity that is at least 80%, 85%, 90%, 92%, 94%, 96%, 98%, 99%, 100%, or more, activity as compared to wild type AAT. In some embodiments, the construct comprises a heterologous AAT gene that encodes a functional variant that is 80%, 85%, 90%, 93%, 95%, 97%, 99% identical to SEQ ID NO: 702, having a functional activity that is at least 80%, 85%, 90%, 92%, 94%, 96%, 98%, 99%, 100%, or more, activity as compared to wild type AAT. In some embodiments, the construct comprises a heterologous AAT gene that encodes a fragment of AAT protein that possesses functional activity that is at least 80%, 85%, 90%, 92%, 94%, 96%, 98%, 99%, 100%, or more, activity as compared to wild type AAT.

[0219] Also described herein are bidirectional nucleic acid constructs that allow enhanced insertion and expression of a heterologous AAT gene. Briefly, various bidirectional constructs disclosed herein comprise at least two nucleic acid segments, wherein one segment (the first segment) comprises a coding sequence that encodes a heterologous AAT (sometimes interchangeably referred to herein as “transgene”), while the other segment (the second segment) comprises a sequence wherein the complement of the sequence encodes a heterologous AAT. The bidirectional constructs may comprise at least two nucleic acid segments in cis, wherein one segment (the first segment) comprises a coding sequence that encodes a heterologous AAT in one orientation, while the other segment (the second segment) comprises a sequence wherein its complement encodes a heterologous AAT in the other orientation. That is, first segment is a complement of the second segment but is not a perfect complement; the complement of the second segment is the reverse complement of the first segment but is not a perfect reverse complement; and both encode a heterologous AAT). A bidirectional construct may comprise a first coding sequence that encodes a heterologous AAT linked to a splice acceptor and a second coding sequence wherein the complement encodes a heterologous AAT in the other orientation, also linked to a splice acceptor. When used in combination with a gene editing system (e.g., CRISPR/Cas system; zinc finger nuclease (ZFN) system; transcription activator-like effector nuclease (TALEN) system) as described herein, the bidirectionality of the nucleic acid constructs allows the construct to be inserted in either direction (is not limited to insertion in one direction) within a target insertion site, allowing the expression of a heterologous AAT from either a) a coding sequence of one segment or 2) a complement of the other segment, thereby enhancing insertion and expression efficiency, as exemplified herein. Various known gene editing systems can be used in the practice of the present disclosure, including, e.g., CRISPR/Cas system; zinc finger nuclease (ZFN) system; transcription activator-like effector nuclease (TALEN) system.

[0220] The bidirectional constructs disclosed herein can be modified to include any suitable structural feature as needed for any particular use or that confers one or more desired function. In some embodiments, the bidirectional nucleic acid construct disclosed herein does not comprise a homology arm. In some embodiments, the bidirectional nucleic acid construct disclosed herein is a homology-independent donor construct. In some embodiments, owing in part to the bidirectional function of the nucleic acid construct, the bidirectional construct can be inserted into a genomic locus in either direction (orientation) as described herein to allow for efficient insertion or expression of a polypeptide of interest (e.g., a heterologous AAT).

[0221] In some embodiments, the bidirectional nucleic acid construct does not comprise a promoter that drives the expression of a heterologous AAT gene. For example, the expression of the polypeptide is driven by a promoter of the host cell (e.g., the endogenous albumin promoter when the transgene is integrated into a host cell's albumin locus). In some embodiments, the bidirectional nucleic acid construct includes a first segment and a second segment, each having a splice acceptor upstream of a transgene. In certain embodiments, the splice acceptor is compatible with the splice donor sequence of the host cell's safe harbor site, e.g. the splice donor of intron 1 of a human albumin gene.

[0222] In some embodiments, the bidirectional nucleic acid construct comprises a first segment comprising a coding sequence for heterologous AAT and a second segment comprising a reverse complement of a coding sequence of heterologous AAT. Thus, the coding sequence in the first segment is capable of expressing heterologous AAT, while the complement of the reverse complement in the second segment is also capable of expressing heterologous AAT. As used herein, “coding sequence” when referring to the second segment comprising a reverse complement sequence refers to the complementary (coding) strand of the second segment (i.e., the complement coding sequence of the reverse complement sequence in the second segment).

[0223] The coding sequence that encodes a heterologous AAT in the first segment is less than 100% complementary to the reverse complement of a coding sequence that also encodes heterologous AAT. That is, in some embodiments, the first segment comprises a coding sequence (1) for heterologous AAT, and the second segment is a reverse complement of a coding sequence (2) for heterologous AAT, wherein the coding sequence (1) is not identical to the coding sequence (2). For example, coding sequence (1) or coding sequence (2) that encodes for heterologous AAT can be codon optimized, such that coding sequence (1) and the reverse complement of coding sequence (2) possess less than 100% complementarity. In some embodiments, the coding sequence of the second segment encodes heterologous AAT using one or more alternative codons for one or more amino acids of the same (i.e., same amino acid sequence) heterologous AAT encoded by the coding sequence in the first segment. An “alternative codon” as used herein refers to variations in codon usage for a given amino acid, and may or may not be a preferred or optimized codon (codon optimized) for a given expression system. Preferred codon usage, or codons that are well-tolerated in a given system of expression is known in the art.

[0224] In some embodiments, the second segment comprises a reverse complement sequence that adopts different codon usage from that of the coding sequence of the first segment in order to reduce hairpin formation. Such a reverse complement forms base pairs with fewer than all nucleotides of the coding sequence in the first segment, yet it optionally encodes the same polypeptide. In such cases, the coding sequence, e.g. for Polypeptide A, of the first segment may be homologous to, but not identical to, the coding sequence, e.g. for Polypeptide A of the second half of the bidirectional construct. In some embodiments, the second segment comprises a reverse complement sequence that is not substantially complementary (e.g., not more than 70% complementary) to the coding sequence in the first segment. In some embodiments, the second segment comprises a reverse complement sequence that is highly complementary (e.g., at least 90% complementary) to the coding sequence in the first segment. In some embodiments, the second segment comprises a reverse complement sequence having at least about 30%, about 35%, about 40%, about 45%, about 50%, about 55%, about 60%, about 65%, about 70%, about 75%, about 80%, about 85%, about 90%, about 95%, about 97%, or about 99% complementarity to the coding sequence in the first segment.

[0225] In some embodiments, the first segment and the second segment are CpG depleted.

[0226] A coding sequence that encodes a polypeptide may optionally comprise one or more additional sequences, such as sequences encoding amino- or carboxy-terminal amino acid sequences such as a signal sequence, label sequence, or heterologous functional sequence (e.g. nuclear localization sequence (NLS)) linked to the polypeptide. A coding sequence that encodes a polypeptide may optionally comprise sequences encoding one or more amino-terminal signal peptide sequences. Each of these additional sequences can be the same or different in the first segment and second segment of the construct.

[0227] The bidirectional construct described herein can be used to express AAT as described herein.

[0228] In some embodiments, the bidirectional nucleic acid construct is linear. For example, the first and second segments are joined in a linear manner through a linker sequence. In some embodiments, the 5′ end of the second segment that comprises a reverse complement sequence is linked to the 3′ end of the first segment. In some embodiments, the 5′ end of the first segment is linked to the 3′ end of the second segment that comprises a reverse complement sequence. In some embodiments, the linker sequence is about 1, 2, 3, 4, 5, 6, 7, 8, 9, 10, 11, 12, 13, 14, 15, 16, 17, 18, 19, 20, 25, 30, 35, 40, 45, 50, 55, 60, 65, 70, 75, 80, 85, 90, 95, 100, 150, 200, 250, 300, 500, 1000, 1500, 2000 or more nucleotides in length. As would be appreciated by those of skill in the art, other structural elements in addition to, or instead of a linker sequence, can be inserted between the first and second segments.

[0229] The constructs disclosed herein can be modified to include any suitable structural feature as needed for any particular use or that confers one or more desired function. In some embodiments, the bidirectional nucleic acid construct disclosed herein does not comprise a homology arm. In some embodiments, owing in part to the bidirectional function of the nucleic acid construct, the bidirectional construct can be inserted into a genomic locus in either direction as described herein to allow for efficient insertion or expression of a polypeptide of interest.

[0230] In some embodiments, one or both of the first and second segment comprises a polyadenylation tail sequence or a polyadenylation signal sequence or site downstream of an open reading frame. In some embodiments, the polyadenylation tail sequence is encoded, e.g., as a “poly-A” stretch, at the 3′ end of the first or second segment. In some embodiments, a polyadenylation tail sequence is provided co-transcriptionally as a result of a polyadenylation signal sequence or site that is encoded at or near the 3′ end of the first or second segment. Methods of designing a suitable polyadenylation tail sequence or polyadenylation signal sequence are well known in the art. Suitable splice acceptor sequences are disclosed and exemplified herein, including mouse albumin and human FIX splice acceptor sites. In some embodiments, the polyadenylation signal sequence AAUAAA (SEQ ID NO: 800) is commonly used in mammalian systems, although variants such as UAUAAA (SEQ ID NO: 801) or AU/GUAAA (SEQ ID NO: 802) have been identified. See, e.g., NJ Proudfoot, Genes & Dev. 25(17):1770-82, 2011. In some embodiments, a polyA tail sequence is included.

[0231] In some embodiments, the constructs disclosed herein can be DNA or RNA, single-stranded, double-stranded, or partially single- and partially double-stranded. For example, the constructs can be single- or double-stranded DNA. In some embodiments, the nucleic acid can be modified (e.g., using nucleoside analogs), as described herein.

[0232] In some embodiments, the constructs disclosed herein comprise a splice acceptor site on either or both ends of the construct, e.g., 5′ of an open reading frame in the first or second segments, or 5′ of one or both transgene sequences. In some embodiments, the splice acceptor site comprises NAG. In further embodiments, the splice acceptor site consists of NAG. In some embodiments, the splice acceptor is an albumin splice acceptor, e.g., an albumin splice acceptor used in the splicing together of exons 1 and 2 of albumin. In some embodiments, the splice acceptor is derived from the human albumin gene. In some embodiments, the splice acceptor is derived from the mouse albumin gene. In some embodiments, the splice acceptor is a mouse albumin splice acceptor, e.g., the mouse albumin splice acceptor used in the splicing together of exons 1 and 2 of albumin. In some embodiments, the splice acceptor is derived from the human albumin gene. Additional suitable splice acceptor sites useful in eukaryotes, including artificial splice acceptors are known and can be derived from the art. See, e.g., Shapiro, et al., 1987, Nucleic Acids Res., 15, 7155-7174, Burset, et al., 2001, Nucleic Acids Res., 29, 255-259.

[0233] In some embodiments, the constructs disclosed herein can be modified on either or both ends to include one or more suitable structural features as needed, or to confer one or more functional benefit. For example, structural modifications can vary depending on the method(s) used to deliver the constructs disclosed herein to a host cell—e.g., use of viral vector delivery or packaging into lipid nanoparticles for delivery. Such modifications include, without limitation, e.g., terminal structures such as inverted terminal repeats (ITR), hairpin, loops, and other structures such as toroid. In some embodiments, the constructs disclosed herein comprise one, two, or three ITRs. In some embodiments, the constructs disclosed herein comprise no more than two ITRs. Various methods of structural modifications are known in the art.

[0234] In some embodiments, one or both ends of the construct can be protected (e.g., from exonucleolytic degradation) by methods known in the art. For example, one or more dideoxynucleotide residues are added to the 3′ terminus of a linear molecule or self-complementary oligonucleotides are ligated to one or both ends. See, for example, Chang et al. (1987) Proc. Natl. Acad. Sci. USA 84:4959-4963; Nehls et al. (1996) Science 272:886-889. Additional methods for protecting the constructs from degradation include, but are not limited to, addition of terminal amino group(s) and the use of modified internucleotide linkages such as, for example, phosphorothioates, phosphoramidates, and O-methyl ribose or deoxyribose residues.

[0235] In some embodiments, the constructs disclosed herein can be introduced into a cell as part of a vector having additional sequences such as, for example, replication origins, promoters and genes encoding antibiotic resistance. In some embodiments, the constructs can be introduced as naked nucleic acid, as nucleic acid complexed with an agent such as a liposome, polymer, or poloxamer, or can be delivered by viral vectors (e.g., adenovirus, AAV, herpesvirus, retrovirus, lentivirus).

[0236] In some embodiments, although not required for expression, the constructs disclosed herein may also include transcriptional or translational regulatory sequences, for example, promoters, enhancers, insulators, internal ribosome entry sites, sequences encoding peptides, or polyadenylation signals.

[0237] In some embodiments, the constructs comprising a coding sequence for a polypeptide of interest may include one or more of the following modifications: codon optimization (e.g., to human codons) or addition of one or more glycosylation sites. See, e.g., McIntosh et al. (2013) Blood (17):3335-44.

[0238] In some embodiments, constructs comprising alternative coding sequences can be designed to be resistant to reduction of expression by nucleic acid therapeutic agents. Nucleic acid therapeutic agents targeted to the SERPINA1 gene are provided herein. Potent gRNAs include G000409, G000414, and G000415 targeted to nucleotides 506-525, 538-557, and 412-431, respectively. RNAi agents targeted to SERPINA1 are known in the art, see, e.g., WO2018098117, WO2015003113, and WO2015195628 directed to iRNA agents targeted to SERPINA1. Potent RNAi agents provided in those applications are targeted to nucleotides 1403-1425, 1410-1436, and 957-997 of GenBank Accession No. NM_001127700.2 (in the version available on the date that the instant application is filed). Provided herein are methods for testing resistance of coding sequences and expression constructs to nucleic acid therapeutic agents. Also, methods of targeting of nucleic acid therapeutics to their target sites, and therefore methods of disrupting targeting of nucleic acid therapeutics to specific target sites are known in the art. Disruption of targeting for guide RNAs can include providing mismatches between the targeting sequence and in the PAM in the guide and the complementary sequence in the expression construct. The core sequence, located at positions +4 to +7 upstream of the PAM is particularly sensitive to mismatch with S. pyogenes Cas9 (see, e.g., Zheng et al., Sci Rep, 207), Disruption of targeting for RNAi agents can include providing mismatches between the antisense strand and the complementary sequence in the expression construct. The seed region of an RNAi agent, i.e., the hexamer or heptamer seed at positions 2-7 or 2-8 of the antisense strand of the siRNA, is particularly sensitive to mismatches (see, e.g., Birmingham et al., Nature Methods, 2006). As the standard of care for AATD relies on supplementation of AAT protein by infusion of ATT from serum, expression of AAT from the a bidirectional construct may be sufficient to treat the disease. However, as the liver pathology is, at least, in part, due to the accumulation of misfolded proteins, upon the development of liver damage, a nucleic acid therapeutic agent could be used to reduce the expression of from the endogenous SERPINA1 gene, without reducing, or substantially reducing (e.g., no more than 5% reduction, no more than 10% reduction) expression of the heterologous AAT from a bidirectional construct for expression of a heterologous AAT where both heterologous coding sequences are resistant to, i.e., not targeted by nucleic acid therapeutics. The bidirectional constructs herein are designed to be resistant to exemplary nucleic acid therapeutic agents known in the art and demonstrated to have robust activity. However, at the time of filing of the instant application, none of the agents have received approval from a regulatory authority for use in treatment of a human subject. It is also possible that other nucleic acid therapeutics targeted to SERPINA1 will be developed. Provided with the strategies and methods provided herein, one of skill in the art can design further bidirectional constructs to be resistant to newly developed nucleic acid therapeutics targeted to SERPINA1.

[0239] Thus, provided herein is a use of a nucleic acid therapeutic targeted to an endogenous SERPIINA1 gene in a method for treating AATD in a subject with one or more symptoms of liver damage associated with AATD, wherein the subject was previously treated with a bidirectional construct encoding a heterologous AAT, wherein both coding sequences within the bidirectional construct include non-wild type codon usage, wherein the coding sequences in the bidirectional construct are not targeted by the nucleic acid therapeutic targeted to the endogenous SERPINA1 gene, so that nucleic acid therapeutic agent reduces the expression of from the endogenous SERPINA1 gene, without reducing, or substantially reducing (e.g., no more than 5% reduction, no more than 10% reduction) expression of the heterologous AAT from a bidirectional construct.

### E. Gene Editing System

[0240] Various known gene editing systems can be used for targeted insertion of a bidirectional nucleic acid construct described herein, including, e.g., CRISPR/Cas system; zinc finger nuclease (ZFN) system; and transcription activator-like effector nuclease (TALEN) system. Generally, the gene editing systems involve the use of engineered cleavage systems to induce a double strand break (DSB) or a nick (e.g., a single strand break, or SSB) in a target DNA sequence. Cleavage or nicking can occur through the use of specific nucleases such as engineered ZFN, TALENs, or using the CRISPR/Cas system with an engineered guide RNA to guide specific cleavage or nicking of a target DNA sequence. Further, targeted nucleases have been, and additional nucleases are being, for example developed based on the Argonaute system (e.g., from T. thermophilus, known as ‘TtAgo’, see Swarts et al (2014) Nature 507(7491): 258-261), which also may have the potential for uses in genome editing and gene therapy.

[0241] It will be appreciated that for methods that use the guide RNAs for a Cas nuclease, such as a Cas9 nuclease disclosed herein, the methods include the use of the CRISPR/Cas system (and any of the donor construct disclosed herein that comprises a sequence encoding a heterologous AAT). It will also be appreciated that the present disclosure contemplates methods of targeted insertion and expression of a heterologous AAT using the bidirectional constructs disclosed herein, which can be performed with or without the albumin guide RNAs disclosed herein (e.g., using a ZFN system to cause a break in a target DNA sequence, creating a site for insertion of the bidirectional construct).

[0242] In some embodiments, a CRISPR/Cas system (e.g., a guide RNA and RNA-guided DNA binding agent) can be used to create a site of insertion at a desired locus within a host genome, at which site a donor construct (e.g., bidirectional construct) comprising a sequence encoding a heterologous AAT disclosed herein can be inserted to express a heterologous AAT. In some embodiments, the heterologous AAT transgene may be heterologous with respect to its insertion site, for example inserted to a safe harbor locus, as described herein. In some embodiments, a guide RNA described herein (SEQ ID NO: 2-33) that targets a human albumin locus (e.g., intron 1) can be used according to the present methods with an RNA-guided DNA binding agent (e.g., Cas nuclease) to create a site of insertion, at which site a donor construct (e.g., bidirectional construct) comprising a sequence encoding a heterologous AAT can be inserted to express a heterologous AAT. The guide RNAs comprising guide sequences for targeted insertion of a heterologous AAT gene into intron 1 of the human albumin locus are exemplified and described herein (see, e.g., Table 1).

[0243] Methods of using various RNA-guided DNA-binding agents, e.g., a nuclease, such as a Cas nuclease, e.g., Cas9, are also well known in the art. It will be appreciated that, depending on the context, the RNA-guided DNA-binding agent can be provided as a nucleic acid (e.g., DNA or mRNA) or as a protein. In some embodiments, the present method can be practiced in a host cell that already expresses an RNA-guided DNA-binding agent.

[0244] In some embodiments, the RNA-guided DNA-binding agent, such as a Cas9 nuclease, has cleavase activity, which can also be referred to as double-strand endonuclease activity. In some embodiments, the RNA-guided DNA-binding agent, such as a Cas9 nuclease, has nickase activity, which can also be referred to as single-strand endonuclease activity. In some embodiments, the RNA-guided DNA-binding agent comprises a Cas nuclease. Examples of Cas9 nucleases include those of the type II CRISPR systems of S. pyogenes, S. aureus, and other prokaryotes (see, e.g., the list in the next paragraph), and mutant (e.g., engineered or other variant) versions thereof. See, e.g., US2016/0312198 A1; US 2016/0312199 A1.

[0245] Non-limiting exemplary species that the Cas nuclease can be derived from include Streptococcus pyogenes, Streptococcus thermophilus, Streptococcus sp., Staphylococcus aureus, Listeria innocua, Lactobacillus gasseri, Francisella novicida, Wolinella succinogenes, Sutterella wadsworthensis, Gamma proteobacterium, Neisseria meningitidis, Campylobacter jejuni, Pasteurella multocida, Fibrobacter succinogene, Rhodospirillum rubrum, Nocardiopsis dassonvillei, Streptomyces pristinaespiralis, Streptomyces viridochromogenes, Streptomyces viridochromogenes, Streptosporangium roseum, Streptosporangium roseum, Alicyclobacillus acidocaldarius, Bacillus pseudomycoides, Bacillus selenitireducens, Exiguobacterium sibiricum, Lactobacillus delbrueckii, Lactobacillus salivarius, Lactobacillus buchneri, Treponema denticola, Microscilla marina, Burkholderiales bacterium, Polaromonas naphthalenivorans, Polaromonas sp., Crocosphaera watsonii, Cyanothece sp., Microcystis aeruginosa, Synechococcus sp., Acetohalobium arabaticum, Ammonifex degensii, Caldicelulosiruptor becscii, Candidatus Desulforudis, Clostridium botulinum, Clostridium difficile, Finegoldia magna, Natranaerobius thermophilus, Pelotomaculum thermopropionicum, Acidithiobacillus caldus, Acidithiobacillus ferrooxidans, Allochromatium vinosum, Marinobacter sp., Nitrosococcus halophilus, Nitrosococcus watsoni, Pseudoalteromonas haloplanktis, Ktedonobacter racemifer, Methanohalobium evestigatum, Anabaena variabilis, Nodularia spumigena, Nostoc sp., Arthrospira maxima, Arthrospira platensis, Arthrospira sp., Lyngbya sp., Microcoleus chthonoplastes, Oscillatoria sp., Petrotoga mobilis, Thermosipho africanus, Streptococcus pasteurianus, Neisseria cinerea, Campylobacter lari, Parvibaculum lavamentivorans, Corynebacterium diphtheria, Acidaminococcus sp., Lachnospiraceae bacterium ND2006, and Acaryochloris marina.

[0246] In some embodiments, the Cas nuclease is the Cas9 nuclease from Streptococcus pyogenes. In some embodiments, the Cas nuclease is the Cas9 nuclease from Streptococcus thermophilus. In some embodiments, the Cas nuclease is the Cas9 nuclease from Neisseria meningitidis. In some embodiments, the Cas nuclease is the Cas9 nuclease is from Staphylococcus aureus. In some embodiments, the Cas nuclease is the Cpf1 nuclease from Francisella novicida. In some embodiments, the Cas nuclease is the Cpf1 nuclease from Acidaminococcus sp. In some embodiments, the Cas nuclease is the Cpf1 nuclease from Lachnospiraceae bacterium ND2006. In further embodiments, the Cas nuclease is the Cpf1 nuclease from Francisella tularensis, Lachnospiraceae bacterium, Butyrivibrio proteoclasticus, Peregrinibacteria bacterium, Parcubacteria bacterium, Smithella, Acidaminococcus, Candidatus Methanoplasma termitum, Eubacterium eligens, Moraxella bovoculi, Leptospira inadai, Porphyromonas crevioricanis, Prevotella disiens, or Porphyromonas macacae. In certain embodiments, the Cas nuclease is a Cpf1 nuclease from an Acidaminococcus or Lachnospiraceae.

[0247] In some embodiments, the gRNA together with an RNA-guided DNA-binding agent is called a ribonucleoprotein complex (RNP). In some embodiments, the RNA-guided DNA-binding agent is a Cas nuclease. In some embodiments, the gRNA together with a Cas nuclease is called a Cas RNP. In some embodiments, the RNP comprises Type-I, Type-II, or Type-III components. In some embodiments, the Cas nuclease is the Cas9 protein from the Type-II CRISPR/Cas system. In some embodiment, the gRNA together with Cas9 is called a Cas9 RNP.

[0248] Wild type Cas9 has two nuclease domains: RuvC and HNH. The RuvC domain cleaves the non-target DNA strand, and the HNH domain cleaves the target strand of DNA. In some embodiments, the Cas9 protein comprises more than one RuvC domain or more than one HNH domain. In some embodiments, the Cas9 protein is a wild type Cas9. In each of the composition, use, and method embodiments, the Cas induces a double strand break in target DNA.

[0249] In some embodiments, chimeric Cas nucleases are used, where one domain or region of the protein is replaced by a portion of a different protein. In some embodiments, a Cas nuclease domain may be replaced with a domain from a different nuclease such as Fok1. In some embodiments, a Cas nuclease may be a modified nuclease.

[0250] In other embodiments, the Cas nuclease may be from a Type-I CRISPR/Cas system. In some embodiments, the Cas nuclease may be a component of the Cascade complex of a Type-I CRISPR/Cas system. In some embodiments, the Cas nuclease may be a Cas3 protein. In some embodiments, the Cas nuclease may be from a Type-III CRISPR/Cas system. In some embodiments, the Cas nuclease may have an RNA cleavage activity.

[0251] In some embodiments, the RNA-guided DNA-binding agent has single-strand nickase activity, i.e., can cut one DNA strand to produce a single-strand break, also known as a “nick.” In some embodiments, the RNA-guided DNA-binding agent comprises a Cas nickase. A nickase is an enzyme that creates a nick in dsDNA, i.e., cuts one strand but not the other of the DNA double helix. In some embodiments, a Cas nickase is a version of a Cas nuclease (e.g., a Cas nuclease discussed above) in which an endonucleolytic active site is inactivated, e.g., by one or more alterations (e.g., point mutations) in a catalytic domain. See, e.g., U.S. Pat. No. 8,889,356 for discussion of Cas nickases and exemplary catalytic domain alterations. In some embodiments, a Cas nickase such as a Cas9 nickase has an inactivated RuvC or HNH domain.

[0252] In some embodiments, the RNA-guided DNA-binding agent is modified to contain only one functional nuclease domain. For example, the agent protein may be modified such that one of the nuclease domains is mutated or fully or partially deleted to reduce its nucleic acid cleavage activity. In some embodiments, a nickase is used having a RuvC domain with reduced activity. In some embodiments, a nickase is used having an inactive RuvC domain. In some embodiments, a nickase is used having an HNH domain with reduced activity. In some embodiments, a nickase is used having an inactive HNH domain.

[0253] In some embodiments, a conserved amino acid within a Cas protein nuclease domain is substituted to reduce or alter nuclease activity. In some embodiments, a Cas nuclease may comprise an amino acid substitution in the RuvC or RuvC-like nuclease domain. Exemplary amino acid substitutions in the RuvC or RuvC-like nuclease domain include D10A (based on the S. pyogenes Cas9 protein). See, e.g., Zetsche et al. (2015) Cell October 22:163(3): 759-771. In some embodiments, the Cas nuclease may comprise an amino acid substitution in the HNH or HNH-like nuclease domain. Exemplary amino acid substitutions in the HNH or HNH-like nuclease domain include E762A, H840A, N863A, H983A, and D986A (based on the S. pyogenes Cas9 protein). See, e.g., Zetsche et al. (2015). Further exemplary amino acid substitutions include D917A, E1006A, and D1255A (based on the Francisella novicida U112 Cpf1 (FnCpf1) sequence (UniProtKB—AOQ7Q2 (CPF1_FRATN)).

[0254] In some embodiments, a nickase is provided in combination with a pair of guide RNAs that are complementary to the sense and antisense strands of the target sequence, respectively. In this embodiment, the guide RNAs direct the nickase to a target sequence and introduce a DSB by generating a nick on opposite strands of the target sequence (i.e., double nicking). In some embodiments, a nickase is used together with two separate guide RNAs targeting opposite strands of DNA to produce a double nick in the target DNA. In some embodiments, a nickase is used together with two separate guide RNAs that are selected to be in close proximity to produce a double nick in the target DNA.

[0255] In some embodiments, the RNA-guided DNA-binding agent comprises one or more heterologous functional domains (e.g., is or comprises a fusion polypeptide).

[0256] In some embodiments, the heterologous functional domain may facilitate transport of the RNA-guided DNA-binding agent into the nucleus of a cell. For example, the heterologous functional domain may be a nuclear localization signal (NLS). In some embodiments, the RNA-guided DNA-binding agent may be fused with 1-10 NLS(s). In some embodiments, the RNA-guided DNA-binding agent may be fused with 1-5 NLS(s). In some embodiments, the RNA-guided DNA-binding agent may be fused with one NLS. Where one NLS is used, the NLS may be linked at the N-terminus or the C-terminus of the RNA-guided DNA-binding agent sequence. It may also be inserted within the RNA-guided DNA-binding agent sequence. In other embodiments, the RNA-guided DNA-binding agent may be fused with more than one NLS. In some embodiments, the RNA-guided DNA-binding agent may be fused with 2, 3, 4, or 5 NLSs. In some embodiments, the RNA-guided DNA-binding agent may be fused with two NLSs. In certain circumstances, the two NLSs may be the same (e.g., two SV40 NLSs) or different. In some embodiments, the RNA-guided DNA-binding agent is fused to two SV40 NLS sequences linked at the carboxy terminus. In some embodiments, the RNA-guided DNA-binding agent may be fused with two NLSs, one linked at the N-terminus and one at the C-terminus. In some embodiments, the RNA-guided DNA-binding agent may be fused with 3 NLSs. In some embodiments, the RNA-guided DNA-binding agent may be fused with no NLS. In some embodiments, the NLS may be a monopartite sequence, such as, e.g., the SV40 NLS, PKKKRKV (SEQ ID NO: 600) or PKKKRRV (SEQ ID NO: 601). In some embodiments, the NLS may be a bipartite sequence, such as the NLS of nucleoplasmin, KRPAATKKAGQAKKKK (SEQ ID NO: 602). In a specific embodiment, a single PKKKRKV (SEQ ID NO: 600) NLS may be linked at the C-terminus of the RNA-guided DNA-binding agent. One or more linkers are optionally included at the fusion site.

### III. Delivery Methods

[0257] The guide RNA (albumin gRNA; SERPINA1 gRNA), RNA-guided DNA binding agents (e.g., Cas nuclease), and nucleic acid constructs (e.g., bidirectional construct) disclosed herein can be delivered to a host cell or subject, in vivo or ex vivo, using various known and suitable methods available in the art. The guide RNA, RNA-guided DNA binding agents, and nucleic acid constructs can be delivered individually or together in any combination, using the same or different delivery methods as appropriate.

[0258] Conventional viral and non-viral based gene delivery methods can be used to introduce the guide RNA disclosed herein as well as the RNA-guided DNA binding agent and donor construct in cells (e.g., mammalian cells) and target tissues. As further provided herein, non-viral vector delivery systems nucleic acids such as non-viral vectors, plasmid vectors, and, e.g naked nucleic acid, and nucleic acid complexed with a delivery vehicle such as a liposome, lipid nanoparticle (LNP), or poloxamer. Viral vector delivery systems include DNA and RNA viruses.

[0259] Methods and compositions for non-viral delivery of nucleic acids include electroporation, lipofection, microinjection, biolistics, virosomes, liposomes, immunoliposomes, LNPs, polycation or lipid:nucleic acid conjugates, naked nucleic acid (e.g., naked DNA/RNA), artificial virions, and agent-enhanced uptake of DNA. Sonoporation using, e.g., the Sonitron 2000 system (Rich-Mar) can also be used for delivery of nucleic acids.

[0260] Additional exemplary nucleic acid delivery systems include those provided by AmaxaBiosystems (Cologne, Germany), Maxcyte, Inc. (Rockville, Md.), BTX Molecular Delivery Systems (Holliston, Ma.) and Copernicus Therapeutics Inc., (see for example U.S. Pat. No. 6,008,336). Lipofection is described in e.g., U.S. Pat. Nos. 5,049,386; 4,946,787; and 4,897,355) and lipofection reagents are sold commercially (e.g., Transfectam™ and Lipofectin™). The preparation of lipid:nucleic acid complexes, including targeted liposomes such as immunolipid complexes, is well known in the art, and as described herein.

[0261] Various delivery systems (e.g., vectors, liposomes, LNPs) containing the guide RNAs, RNA-guided DNA binding agent, and donor construct, singly or in combination, can also be administered to an organism for delivery to cells in vivo or administered to a cell or cell culture ex vivo. Administration is by any of the routes normally used for introducing a molecule into ultimate contact with blood, fluid, or cells including, but not limited to, injection, infusion, topical application and electroporation. Suitable methods of administering such nucleic acids are available and well known to those of skill in the art.

[0262] In certain embodiments, the present disclosure provides DNA or RNA vectors encoding any one or more of the compositions disclosed herein—e.g., a guide RNA (albumin gRNA; or SERPINA1 gRNA) comprising any one or more of the guide sequences described herein; a construct (e.g., bidirectional construct) comprising a sequence encoding heterologous AAT; or a sequence encoding an RNA-guided DNA binding agent. In certain embodiments, the composition comprises DNA or RNA vectors encoding any one or more of the compositions described herein, or in any combination. In some embodiments, the vectors further comprise, e.g., promoters, enhancers, and regulatory sequences. In some embodiments, the vector that comprises a bidirectional construct comprising a sequence that encodes a heterologous AAT does not comprise a promoter that drives heterologous AAT expression. In some embodiments, the vector that comprises a guide RNA comprising any one or more of the guide sequences described herein (albumin gRNA; or SERPINA1 gRNA) also comprises one or more nucleotide sequence(s) encoding a crRNA, a trRNA, or a crRNA and trRNA, as disclosed herein.

[0263] In some embodiments, the vector comprises a nucleotide sequence encoding a guide RNA (albumin gRNA; or SERPINA1 gRNA) described herein. In some embodiments, the vector comprises one copy of a guide RNA. In other embodiments, the vector comprises more than one copy of a guide RNA. In embodiments with more than one guide RNA, the guide RNAs may be non-identical such that they target different target sequences, or may be identical in that they target the same target sequence. In some embodiments where the vectors comprise more than one guide RNA, each guide RNA may have other different properties, such as activity or stability within a complex with an RNA-guided DNA nuclease, such as a Cas RNP complex. In some embodiments, the nucleotide sequence encoding the guide RNA may be operably linked to at least one transcriptional or translational control sequence, such as a promoter, a 3′ UTR, or a 5′ UTR. In one embodiment, the promoter may be a tRNA promoter, e.g., tRNA^{Lys3}, or a tRNA chimera. See Mefferd et al., RNA. 2015 21:1683-9; Scherer et al., Nucleic Acids Res. 2007 35: 2620-2628. In some embodiments, the promoter may be recognized by RNA polymerase III (Pol III). Non-limiting examples of Pol III promoters include U6 and H1 promoters. In some embodiments, the nucleotide sequence encoding the guide RNA may be operably linked to a mouse or human U6 promoter. In other embodiments, the nucleotide sequence encoding the guide RNA may be operably linked to a mouse or human H1 promoter. In embodiments with more than one guide RNA, the promoters used to drive expression may be the same or different. In some embodiments, the nucleotide encoding the crRNA of the guide RNA and the nucleotide encoding the trRNA of the guide RNA may be provided on the same vector. In some embodiments, the nucleotide encoding the crRNA and the nucleotide encoding the trRNA may be driven by the same promoter. In some embodiments, the crRNA and trRNA may be transcribed into a single transcript. For example, the crRNA and trRNA may be processed from the single transcript to form a double-molecule guide RNA. Alternatively, the crRNA and trRNA may be transcribed into a single-molecule guide RNA (sgRNA). In other embodiments, the crRNA and the trRNA may be driven by their corresponding promoters on the same vector. In yet other embodiments, the crRNA and the trRNA may be encoded by different vectors.

[0264] In some embodiments, the nucleotide sequence encoding the guide RNA (albumin gRNA; or SERPINA1 gRNA) may be located on the same vector comprising the nucleotide sequence encoding an RNA-guided DNA binding agent such as a Cas protein. In some embodiments, one or more albumin gRNA or one or more SERPINA1 gRNA may be located on the same vector. In some embodiments, one or more albumin gRNA or one or more SERPINA1 gRNA may be located on the same vector with the nucleotide sequence encoding an RNA-guided DNA binding agent such as a Cas protein. In some embodiments, expression of the guide RNA and of the RNA-guided DNA binding agent such as a Cas protein may be driven by their own corresponding promoters. In some embodiments, expression of the guide RNA may be driven by the same promoter that drives expression of the RNA-guided DNA binding agent such as a Cas protein. In some embodiments, the guide RNA and the RNA-guided DNA binding agent such as a Cas protein transcript may be contained within a single transcript. For example, the guide RNA may be within an untranslated region (UTR) of the RNA-guided DNA binding agent such as a Cas protein transcript. In some embodiments, the guide RNA may be within the 5′ UTR of the transcript. In other embodiments, the guide RNA may be within the 3′ UTR of the transcript. In some embodiments, the intracellular half-life of the transcript may be reduced by containing the guide RNA within its 3′ UTR and thereby shortening the length of its 3′ UTR. In additional embodiments, the guide RNA may be within an intron of the transcript. In some embodiments, suitable splice sites may be added at the intron within which the guide RNA is located such that the guide RNA is properly spliced out of the transcript. In some embodiments, expression of the RNA-guided DNA binding agent such as a Cas protein and the guide RNA from the same vector in close temporal proximity may facilitate more efficient formation of the CRISPR RNP complex.

[0265] In some embodiments, the nucleotide sequence encoding the guide RNA (albumin gRNA; or SERPINA1 gRNA) or RNA-guided DNA binding agent may be located on the same vector comprising the construct that comprises a heterologous AAT gene. In some embodiments, proximity of the construct comprising the AAT gene and the guide RNA (or the RNA-guided DNA binding agent) on the same vector may facilitate more efficient insertion of the construct into a site of insertion created by the guide RNA/RNA-guided DNA binding agent.

[0266] In some embodiments, the vector comprises one or more nucleotide sequence(s) encoding a sgRNA (albumin gRNA; or SERPINA1 gRNA) and an mRNA encoding an RNA-guided DNA binding agent, which can be a Cas protein, such as Cas9 or Cpf1. In some embodiments, the vector comprises one or more nucleotide sequence(s) encoding a crRNA, a trRNA, and an mRNA encoding an RNA-guided DNA binding agent, which can be a Cas protein, such as, Cas9 or Cpf1. In one embodiment, the Cas9 is from Streptococcus pyogenes (i.e., Spy Cas9). In some embodiments, the nucleotide sequence encoding the crRNA, trRNA, or crRNA and trRNA (which may be a sgRNA) comprises or consists of a guide sequence flanked by all or a portion of a repeat sequence from a naturally-occurring CRISPR/Cas system. The nucleic acid comprising or consisting of the crRNA, trRNA, or crRNA and trRNA may further comprise a vector sequence wherein the vector sequence comprises or consists of nucleic acids that are not naturally found together with the crRNA, trRNA, or crRNA and trRNA.

[0267] In some embodiments, the crRNA and the trRNA are encoded by non-contiguous nucleic acids within one vector. In other embodiments, the crRNA and the trRNA may be encoded by a contiguous nucleic acid. In some embodiments, the crRNA and the trRNA are encoded by opposite strands of a single nucleic acid. In other embodiments, the crRNA and the trRNA are encoded by the same strand of a single nucleic acid.

[0268] In some embodiments, the vector comprises a donor construct (e.g., the bidirectional nucleic acid construct) comprising a sequence that encodes a heterologous AAT, as disclosed herein. In some embodiments, in addition to the donor construct (e.g., bidirectional nucleic acid construct) disclosed herein, the vector may further comprise nucleic acids that encode the albumin guide RNAs described herein or nucleic acid encoding an RNA-guided DNA-binding agent (e.g., a Cas nuclease such as Cas9). In some embodiments, a nucleic acid encoding an albumin guide RNA or a nucleic acid encoding an RNA-guided DNA-binding agent are each or both on a separate vector from a vector that comprises the donor construct (e.g., bidirectional construct) disclosed herein. In any of the embodiments, the vector may include other sequences that include, but are not limited to, promoters, enhancers, regulatory sequences, as described herein. In some embodiments, the promoter does not drive the expression of the heterologous AAT of the donor construct (e.g., bidirectional construct). In some embodiments, the vector comprises one or more nucleotide sequence(s) encoding a crRNA, a trRNA, or a crRNA and trRNA. In some embodiments, the vector comprises one or more nucleotide sequence(s) encoding a sgRNA and an mRNA encoding an RNA-guided DNA nuclease, which can be a Cas nuclease (e.g., Cas9). In some embodiments, the vector comprises one or more nucleotide sequence(s) encoding a crRNA, a trRNA, and an mRNA encoding an RNA-guided DNA nuclease, which can be a Cas nuclease, such as, Cas9. In some embodiments, the Cas9 is from Streptococcus pyogenes (i.e., Spy Cas9). In some embodiments, the nucleotide sequence encoding the crRNA, trRNA, or crRNA and trRNA (which may be a sgRNA) comprises or consists of a guide sequence flanked by all or a portion of a repeat sequence from a naturally-occurring CRISPR/Cas system. The nucleic acid comprising or consisting of the crRNA, trRNA, or crRNA and trRNA may further comprise a vector sequence wherein the vector sequence comprises or consists of nucleic acids that are not naturally found together with the crRNA, trRNA, or crRNA and trRNA.

[0269] In some embodiments, the vector may be circular. In other embodiments, the vector may be linear. In some embodiments, the vector may be enclosed in a lipid nanoparticle, liposome, non-lipid nanoparticle, or viral capsid. Non-limiting exemplary vectors include plasmids, phagemids, cosmids, artificial chromosomes, minichromosomes, transposons, viral vectors, and expression vectors.

[0270] In some embodiments, the vector may be a viral vector. In some embodiments, the viral vector may be genetically modified from its wild type counterpart. For example, the viral vector may comprise an insertion, deletion, or substitution of one or more nucleotides to facilitate cloning or such that one or more properties of the vector is changed. Such properties may include packaging capacity, transduction efficiency, immunogenicity, genome integration, replication, transcription, and translation. In some embodiments, a portion of the viral genome may be deleted such that the virus is capable of packaging exogenous sequences having a larger size. In some embodiments, the viral vector may have an enhanced transduction efficiency. In some embodiments, the immune response induced by the virus in a host may be reduced. In some embodiments, viral genes (such as, e.g., integrase) that promote integration of the viral sequence into a host genome may be mutated such that the virus becomes non-integrating. In some embodiments, the viral vector may be replication defective. In some embodiments, the viral vector may comprise exogenous transcriptional or translational control sequences to drive expression of coding sequences on the vector. In some embodiments, the virus may be helper-dependent. For example, the virus may need one or more helper virus to supply viral components (such as, e.g., viral proteins) required to amplify and package the vectors into viral particles. In such a case, one or more helper components, including one or more vectors encoding the viral components, may be introduced into a host cell along with the vector system described herein. In other embodiments, the virus may be helper-free. For example, the virus may be capable of amplifying and packaging the vectors without a helper virus. In some embodiments, the vector system described herein may also encode the viral components required for virus amplification and packaging.

[0271] Non-limiting exemplary viral vectors include adeno-associated virus (AAV) vector, lentivirus vectors, adenovirus vectors, helper dependent adenoviral vectors (HDAd), herpes simplex virus (HSV-1) vectors, bacteriophage T4, baculovirus vectors, and retrovirus vectors. In some embodiments, the viral vector may be an AAV vector. In other embodiments, the viral vector may a lentivirus vector.

[0272] In some embodiments, “AAV” refers all serotypes, subtypes, and naturally-occurring AAV as well as recombinant AAV. “AAV” may be used to refer to the virus itself or a derivative thereof. The term “AAV” includes AAV1, AAV2, AAV3, AAV3B, AAV4, AAV5, AAV6, AAV6.2, AAV7, AAVrh.64R1, AAVhu.37, AAVrh.8, AAVrh.32.33, AAV8, AAV9, AAV-DJ, AAV2/8, AAVrh10, AAVLK03, AV10, AAV11, AAV12, rh10, and hybrids thereof, avian AAV, bovine AAV, canine AAV, equine AAV, primate AAV, nonprimate AAV, and ovine AAV. In certain embodiments, the term “AAV” includes AAV3B, AAVhu.37, AAV9, AAV-DJ, AAV2/8, AAVrh10, AAVLK03, and AAV8. The genomic sequences of various serotypes of AAV, as well as the sequences of the native terminal repeats (TRs), Rep proteins, and capsid subunits are known in the art. Such sequences may be found in the literature or in public databases such as GenBank. A “AAV vector” as used herein refers to an AAV vector comprising a heterologous sequence not of AAV origin (i.e., a nucleic acid sequence heterologous to AAV), typically comprising a sequence encoding a heterologous polypeptide of interest (e.g., AAT). The construct may comprise an AAV1, AAV2, AAV3, AAV3B, AAV4, AAV5, AAV6, AAV6.2, AAV7, AAVrh.64R1, AAVhu.37, AAVrh.8, AAVrh.32.33, AAV8, AAV9, AAV-DJ, AAV2/8, AAVrh10, AAVLK03, AV10, AAV11, AAV12, rh10, and hybrids thereof, avian AAV, bovine AAV, canine AAV, equine AAV, primate AAV, nonprimate AAV, and ovine AAV capside sequence. In general, the heterologous nucleic acid sequence (the transgene) is flanked by at least one, at least two, or at least three AAV inverted terminal repeat sequences (ITRs). An AAV vector may either be single-stranded (ssAAV) or self-complementary (scAAV). In certain embodiments, one or more regions of the AAV vector may be CpG depleted. In certain embodiments, the ITR are not CpG depleted. In certain embodiments, the ITR are CpG depleted.

[0273] In some embodiments, the lentivirus may be non-integrating. In some embodiments, the viral vector may be an adenovirus vector. In some embodiments, the adenovirus may be a high-cloning capacity or “gutless” adenovirus, where all coding viral regions apart from the 5′ and 3′ inverted terminal repeats (ITRs) and the packaging signal (‘I’) are deleted from the virus to increase its packaging capacity. In yet other embodiments, the viral vector may be an HSV-1 vector. In some embodiments, the HSV-1-based vector is helper dependent, and in other embodiments it is helper independent. For example, an amplicon vector that retains only the packaging sequence requires a helper virus with structural components for packaging, while a 30 kb-deleted HSV-1 vector that removes non-essential viral functions does not require helper virus. In additional embodiments, the viral vector may be bacteriophage T4. In some embodiments, the bacteriophage T4 may be able to package any linear or circular DNA or RNA molecules when the head of the virus is emptied. In further embodiments, the viral vector may be a baculovirus vector. In yet further embodiments, the viral vector may be a retrovirus vector. In embodiments using AAV or lentiviral vectors, which have smaller cloning capacity, it may be necessary to use more than one vector to deliver all the components of a vector system as disclosed herein. For example, one AAV vector may contain sequences encoding an RNA-guided DNA binding agent such as a Cas protein (e.g., Cas9), while a second AAV vector may contain one or more guide sequences.

[0274] In some embodiments, the vector system may be capable of driving expression of one or more coding sequences in a cell. In some embodiments, the vector does not comprise a promoter that drives expression of one or more coding sequences once it is integrated in a cell (e.g., uses the host cell's endogenous promoter such as when inserted at intron 1 of an albumin locus, as exemplified herein). In some embodiments, the cell may be a prokaryotic cell, such as, e.g., a bacterial cell. In some embodiments, the cell may be a eukaryotic cell, such as, e.g., a yeast, plant, insect, or mammalian cell. In some embodiments, the eukaryotic cell may be a mammalian cell. In some embodiments, the eukaryotic cell may be a rodent cell. In some embodiments, the eukaryotic cell may be a human cell. Suitable promoters to drive expression in different types of cells are known in the art. In some embodiments, the promoter may be wild type. In other embodiments, the promoter may be modified for more efficient or efficacious expression. In yet other embodiments, the promoter may be truncated yet retain its function. For example, the promoter may have a normal size or a reduced size that is suitable for proper packaging of the vector into a virus.

[0275] In some embodiments, the vector may comprise a nucleotide sequence encoding an RNA-guided DNA binding agent such as a Cas protein (e.g., Cas9) described herein. In some embodiments, the nuclease encoded by the vector may be a Cas protein. In some embodiments, the vector system may comprise one copy of the nucleotide sequence encoding the nuclease. In other embodiments, the vector system may comprise more than one copy of the nucleotide sequence encoding the nuclease. In some embodiments, the nucleotide sequence encoding the nuclease may be operably linked to at least one transcriptional or translational control sequence. In some embodiments, the nucleotide sequence encoding the nuclease may be operably linked to at least one promoter.

[0276] In some embodiments, the vector may comprise any one or more of the constructs comprising a heterologous AAT gene described herein. In some embodiments, the heterologous AAT gene may be operably linked to at least one transcriptional or translational control sequence. In some embodiments, the heterologous AAT gene may be operably linked to at least one promoter. In some embodiments, the heterologous gene is not linked to a promoter that drives the expression of the heterologous gene.

[0277] In some embodiments, the promoter may be constitutive, inducible, or tissue-specific. In some embodiments, the promoter may be a constitutive promoter. Non-limiting exemplary constitutive promoters include cytomegalovirus immediate early promoter (CMV), simian virus (SV40) promoter, adenovirus major late (MLP) promoter, Rous sarcoma virus (RSV) promoter, mouse mammary tumor virus (MMTV) promoter, phosphoglycerate kinase (PGK) promoter, elongation factor-alpha (EF1a) promoter, ubiquitin promoters, actin promoters, tubulin promoters, immunoglobulin promoters, a functional fragment thereof, or a combination of any of the foregoing. In some embodiments, the promoter may be a CMV promoter. In some embodiments, the promoter may be a truncated CMV promoter. In other embodiments, the promoter may be an EF1a promoter. In some embodiments, the promoter may be an inducible promoter. Non-limiting exemplary inducible promoters include those inducible by heat shock, light, chemicals, peptides, metals, steroids, antibiotics, or alcohol. In some embodiments, the inducible promoter may be one that has a low basal (non-induced) expression level, such as, e.g., the Tet-On® promoter (Clontech).

[0278] In some embodiments, the promoter may be a tissue-specific promoter, e.g., a promoter specific for expression in the liver.

[0279] In some embodiments, the compositions comprise a vector system. In some embodiments, the vector system may comprise one single vector. In other embodiments, the vector system may comprise two vectors. In additional embodiments, the vector system may comprise three vectors. When different guide RNAs are used for multiplexing, or when multiple copies of the guide RNA are used, the vector system may comprise more than three vectors.

[0280] In some embodiments, the vector system may comprise inducible promoters to start expression only after it is delivered to a target cell. Non-limiting exemplary inducible promoters include those inducible by heat shock, light, chemicals, peptides, metals, steroids, antibiotics, or alcohol. In some embodiments, the inducible promoter may be one that has a low basal (non-induced) expression level, such as, e.g., the Tet-On® promoter (Clontech).

[0281] In additional embodiments, the vector system may comprise tissue-specific promoters to start expression only after it is delivered into a specific tissue.

[0282] The vector comprising: one or more guide RNA (albumin gRNA or SERPINA1 gRNA), RNA-binding DNA binding agent, or donor construct comprising a sequence encoding a heterologous AAT protein, individually or in any combination, may be delivered by liposome, a nanoparticle, an exosome, or a microvesicle. The vector may also be delivered by a lipid nanoparticle (LNP). One or more guide RNA (albumin gRNA or SERPINA1 gRNA), RNA-binding DNA binding agent (e.g. mRNA), or donor construct comprising a sequence encoding a heterologous AAT protein, individually or in any combination, may be delivered by liposome, a nanoparticle, an exosome, or a microvesicle. One or more guide RNA (albumin gRNA or SERPINA1 gRNA), RNA-binding DNA binding agent (e.g. mRNA), or donor construct comprising a sequence encoding a heterologous AAT protein, individually or in any combination, may be delivered by LNP.

[0283] Lipid nanoparticles (LNPs) are a well-known means for delivery of nucleotide and protein cargo, and may be used for delivery of any of the guide RNAs (e.g., albumin gRNA; or SERPINA1 gRNA), RNA-guided DNA binding agent, or donor construct (e.g., bidirectional construct) disclosed herein. In some embodiments, the LNPs deliver the compositions in the form of nucleic acid (e.g., DNA or mRNA), or protein (e.g., Cas nuclease), or nucleic acid together with protein, as appropriate.

[0284] In some embodiments, provided herein is a method for delivering any of the guide RNAs described herein (albumin gRNA; or SERPINA1 gRNA) or donor construct (e.g., bidirectional construct) disclosed herein, alone or in combination, to a host cell or subject, wherein any one or more of the components is associated with an LNP. In some embodiments, the method further comprises an RNA-guided DNA binding agent (e.g., Cas9 or a sequence encoding Cas9).

[0285] In some embodiments, provided herein is a composition comprising any of the guide RNAs described herein (albumin gRNA; or SERPINA1 gRNA) or donor construct (e.g., bidirectional construct) disclosed herein, alone or in combination, with an LNP. In some embodiments, the composition further comprises an RNA-guided DNA binding agent (e.g., Cas9 or a nucleic acid sequence encoding Cas9).

[0286] In some embodiments, the LNPs comprise biodegradable, ionizable lipids. In some embodiments, the LNPs comprise (9Z,12Z)-3-((4,4-bis(octyloxy)butanoyl)oxy)-2-((((3-(diethylamino)propoxy)carbonyl)oxy)methyl)propyl octadeca-9,12-dienoate, also called 3-((4,4-bis(octyloxy)butanoyl)oxy)-2-((((3-(diethylamino)propoxy)carbonyl)oxy)methyl)propyl (9Z,12Z)-octadeca-9,12-dienoate) or another ionizable lipid. See, e.g., lipids of WO2019067992, WO/2017/173054, WO2015/095340, and WO2014/136086, as well as references provided therein. In some embodiments, the term cationic and ionizable in the context of LNP lipids is interchangeable, e.g., wherein ionizable lipids are cationic depending on the pH.

[0287] In some embodiments, LNPs associated with the bidirectional construct disclosed herein are for use in preparing a medicament for treating a disease or disorder. The disease or disorder may be a disease associated with al-antitrypsin deficiency (AATD).

[0288] In some embodiments, any of the guide RNAs described herein, RNA-guided DNA binding agents described herein, or donor construct (e.g., bidirectional construct) disclosed herein, alone or in combination, whether naked or as part of a vector, is formulated in or administered via a lipid nanoparticle; see e.g., WO/2017/173054, the contents of which are hereby incorporated by reference in their entirety.

[0289] It will be apparent that any one or more guide RNA disclosed herein (albumin gRNA; or SERPINA1 gRNA), an RNA-guided DNA binding agent (e.g., Cas nuclease or a nucleic acid encoding a Cas nuclease), and a donor construct (e.g., bidirectional construct) comprising a sequence encoding a heterologous AAT can be delivered using the same or different systems. For example, the guide RNA, RNA-guided DNA binding agent (e.g., Cas nuclease), and construct can be carried by the same vector (e.g., AAV). Alternatively, the RNA-guided DNA binding agent such as a Cas nuclease (as a protein or mRNA) or gRNA (albumin gRNA; or SERPINA1 gRNA) can be carried by a plasmid or LNP, while the donor construct can be carried by a vector such as AAV. The use of any of the variety of combinations will be guided by, e.g., the practicality and efficiency of their use. Furthermore, the different delivery systems can be administered by the same or different routes (e.g. by infusion; by injection, such as intramuscular injection, tail vein injection, or other intravenous injection; by intraperitoneal administration or intramuscular injection).

[0290] The different delivery systems can be delivered in vitro or in vivo simultaneously or in any sequential order. In some embodiments, the donor construct, guide RNA (albumin gRNA; or SERPINA1 gRNA), and Cas nuclease can be delivered in vitro or in vivo simultaneously, e.g., in one vector, two vectors, three vectors, individual vectors, one LNP, two LNPs, three LNPs, individual LNPs, or a combination thereof. In some embodiments, the donor construct can be delivered in vivo or in vitro, as a vector or associated with a LNP, prior to (e.g., about 1, 2, 3, 4, 5, 6, 7, 8, 9, 10, 11, 12, 13, 14, or more days) delivering the albumin guide RNA or Cas nuclease, as a vector or associated with a LNP singly or together as a ribonucleoprotein (RNP). In some embodiments, the donor construct is delivered in a single administration. In some embodiments, the donor construct can be delivered in multiple administrations. As a further example, the albumin guide RNA and Cas nuclease, as a vector or mRNA or associated with a LNP singly or together as a ribonucleoprotein (RNP), can be delivered in vivo or in vitro, prior to delivering the construct, as a vector or associated with a LNP. In some embodiments, the albumin guide RNA is delivered in a single administration. In some embodiments, the albumin guide RNA can be delivered in multiple administrations. Similarly, the SERPINA1 guide RNA and the Cas nuclease, as a vector or mRNA or associated with a LNP singly or together as a ribonucleoprotein (RNP).

[0291] In some embodiments, the present disclosure also provides pharmaceutical formulations for administering any of the guide RNAs (albumin gRNA; or SERPINA1 gRNA) disclosed herein. In some embodiments, the pharmaceutical formulation includes an RNA-guided DNA binding agent (e.g., Cas nuclease) and a donor construct comprising a coding sequence of a heterologous AAT, as disclosed herein. Pharmaceutical formulations suitable for delivery into a subject (e.g., human subject) are well known in the art.

### IV. Methods of Use

[0292] The gene encoding AAT is located on chromosome 14q32.1 and part of the Protease Inhibitor (Pi) locus. Normal AAT may be referred to as PiM. The PiZ mutation can cause liver or lung symptoms, including in homozygous (ZZ) and heterozygous (MZ or SZ) individuals. The PiS mutation can cause milder reduction in serum AAT and lower risk for lung disease. Numerous other allelic mutations are known in the art. See, e.g., Greulich et al. “Alpha-1-antitrypsin deficiency: increasing awareness and improving diagnosis,” Ther Adv Respir Dis. 2016.

[0293] AATD may be diagnosed by methods known in the art, e.g., by the presence of one or more physiologic symptoms, blood tests, or genetic tests for one or more of the 150+ known AAT mutations reported to date. See, e.g., id. Examples of blood or tests include, but are not limited to, assaying for serum AAT levels, detecting mutations by polymerase chain reaction (PCR) or next generation sequencing (NGS), isoelectric focusing (IEF) with or without immunoblotting, AAT gene locus sequencing, and serum separator cards (lateral flow assay to detect the Z protein).

[0294] In some embodiments, AAT serum levels may be considered normal within the 150-350 mg/dL range using immunodiffusion methods (which may overestimate serum levels). In these embodiments, a level of 80 mg/dL may be regarded as protective, e.g., decreased risk of one or more symptoms, e.g., emphysema, despite being lower than the normal range.

[0295] In some embodiments, AAT serum levels may be considered normal within the 90-200 mg/dL range using nephelometry or immunoturbidimetry and a purified standard. In these embodiments, a level of 50 mg/dL may be regarded as protective, e.g., decreased risk of decreased risk of one or more symptoms, e.g., emphysema, despite being lower than the normal range.

[0296] In some embodiments, AAT serum levels of less than about 130 mg/dL, 125 mg/dL, 120 mg/dL, 115 mg/dL, 110 mg/dL, 105 mg/dL, or 100 mg/dL indicate low likelihood of a homozygous AAT mutation and further genetic testing may not be necessary. In some embodiments, AAT serum levels of about 104 mg/dL indicate low likelihood of homozygous PiS, and 113 mg/dL indicates low likelihood of homozygous PiZ. In some embodiments, AAT serum levels may provide limited exclusion information for heterozygous carriers, and further genetic testing may be necessary, because AAT serum levels of about 150 mg/dL indicate low likelihood of heterozygous carrier PiMZ, and AAT serum levels of about 220 mg/dL indicate low likelihood of heterozygous carrier piMS.

[0297] Examples of detectable physiologic symptoms include, but are not limited to, lung disease or liver disease; wheezing or shortness of breath; increased risk of lung infections; chronic obstructive pulmonary disease (COPD); bronchitis, asthma, dyspnea; cirrhosis; neonatal jaundice; panniculitis; chronic cough or phlegm; recurring chest colds; yellowing of the skin or the white part of the eyes; swelling of the belly or legs. In some embodiments, individuals may be subject to blood or genetic tests if they are COPD patients, nonresponsive asthmatic patients, patients with bronchiectasis of unknown etiology, individuals with cryptogenic cirrhosis/liver disease, granulomatosis with polyangiitis, necrotizing panniculitis, or first-degree relatives of patients/carriers with AATD. In some embodiments, pulmonary function testing (PFT), functional residual capacity (RFC), or lung density loss at total lung capacity (TLC) may be performed.

[0298] In some embodiments, subjects to be treated include individuals with AAT serum below the normal range. In some embodiments, subjects to be treated include individuals with any allelic mutation combination, e.g., ZZ, MZ, MS. In some embodiments, subjects to be treated include individuals with post-bronchodilator FEV1 of at least 30%, 40%, 50%, 60% of predicted normal value. In some embodiments, subjects to be treated include individuals eligible for bronchoscopy. In some embodiments, subjects to be treated include individuals with adequate hepatic and renal function, nonsmokers, individuals who have not had lung or liver lobectomy, transplant, individuals who have not had lung volume reduction surgery, individuals who have not had acute respiratory tract infection or COPD exacerbation immediately prior to treatment, or individuals who do not have unstable cor pulmonale.

[0299] As described herein, the present disclosure provides compositions and methods for expressing heterologous AAT (e.g., a functional or wild-type AAT) at a human safe harbor site, such as an albumin safe harbor site to allow secretion of the protein. In some embodiments, the methods thereby alleviate the negative effects of AATD in the lung. The present disclosure also provides compositions and methods to knock out the endogenous SERPINA1 gene thereby eliminating the production of mutant forms of AAT associated with AAT protein polymerization and aggregation in liver hepatocytes, which lead to liver symptoms in patients with AATD. See WO/2018/119182, incorporated by reference in its entirety. Accordingly, the compositions and methods disclosed herein treat AATD by alleviating the negative effects of the disorder in the lung as well as in the liver.

[0300] AAT is primarily synthesized and secreted by hepatocytes, and functions to inhibit the activity of neutrophil elastase in the lung. Without sufficient quantities of functioning AAT, neutrophil elastase is uncontrolled and damages alveoli in the lung. Thus, mutations in SERPINA1 that result in decreased levels of AAT, or decreased levels of properly functioning AAT, lead to lung pathology, including, e.g., chronic obstructive pulmonary disease (COPD), bronchitis, or asthma.

[0301] The albumin gRNAs, donor construct (e.g., bidirectional construct comprising a sequence encoding a functional heterologous AAT), and RNA-guided DNA binding agents described herein are useful for introducing a heterologous AAT nucleic acid to a host cell, in vivo or in vitro. In some embodiments, the albumin gRNAs, donor construct (e.g., bidirectional construct comprising a sequence encoding a heterologous AAT), and RNA-guided DNA binding agents described herein are useful for expressing a functional heterologous AAT in a host cell, or in a subject in need thereof. In some embodiments, the albumin gRNAs, donor construct (e.g., bidirectional construct comprising a sequence encoding a heterologous AAT), and RNA-guided DNA binding agents described herein are useful for treating AATD in a subject in need thereof. In some embodiments, treatment of AATD by expressing heterologous AAT at an albumin locus enhances secretion of functional (e.g., wild type) AAT, and alleviates one or more symptoms of AATD, e.g., negative effects on the lungs. For example, heterologous AAT expression may alleviate lung disease or liver disease; wheezing or shortness of breath; increased risk of lung infections; COPD; bronchitis, asthma, dyspnea; cirrhosis; neonatal jaundice; panniculitis; chronic cough or phlegm; recurring chest colds; yellowing of the skin or the white part of the eyes; swelling of the belly or legs. Administration of any one or more of the albumin gRNAs, donor construct (e.g., bidirectional construct comprising a sequence encoding heterologous AAT), and RNA-guided DNA binding agents described herein leads to an increase in functional (e.g., wild type) AAT gene expression, AAT protein levels (e.g. circulating, serum, or plasma levels) or AAT activity levels (e.g., trypsin inhibition) (e.g., greater than 10%, 20%, 30%, 40%, 50%, 60%, 70%, 80%, or 90% AAT gene expression or protein levels as compared to an untreated control, e.g., by nephelometry or immunoturbidimetry, e.g., AAT greater than about 40 mg/dL, 45 mg/dL, 50 mg/dL, 60 mg/dL, 70 mg/dL, 80 mg/dL, 90 mg/dL, 100 mg/dL, or 110 mg/dL in serum). In some embodiments, the effectiveness of the treatment can be assessed by measuring serum or plasma AAT activity, wherein an increase in the subject's serum or plasma level or activity of AAT indicates effectiveness of the treatment. In some embodiments, the effectiveness of the treatment can be assessed by measuring serum or plasma AAT protein or activity levels, wherein an increase in the subject's serum or plasma level or activity of AAT indicates effectiveness of the treatment. In some embodiments, effectiveness of the treatment can be assessed by PASD staining of liver tissue sections, e.g., to measure aggregation. In some embodiments, effectiveness of the treatment can be assessed by measuring inhibition of neutrophil elastase, e.g., in the lung. In some embodiments, effectiveness of the treatment can be assessed by genotype serum level, AAT lung function, spirometry test, chest X-ray of lung, CT scan of lung, blood testing of liver function, or ultrasound of liver.

[0302] In some embodiments, treatment refers to increasing serum AAT levels, e.g., to protective levels. In some embodiments, treatment refers to increasing serum AAT levels, e.g., within the normal range. In some embodiments, treatment refers to increasing serum AAT levels, e.g., above 40, 50, 60, 70, 80, 90, or 100 mg/dL, e.g., as measured using nephelometry or immunoturbidimetry and a purified standard.

[0303] In some embodiments, treatment refers to increasing serum AAT levels, e.g., to protective levels. In some embodiments, treatment refers to increasing serum AAT levels, e.g., within the normal range. In some embodiments, treatment refers to increasing serum AAT levels, e.g., above 40, 50, 60, 70, 80, 90, or 100 mg/dL, e.g., as measured using nephelometry or immunoturbidimetry and a purified standard. In some embodiments, treatment refers to improvement in baseline serum AAT as compared to control, e.g., before and after treatment. In some embodiments, treatment refers to an improvement in histologic grading of AATD associated liver disease, e.g., by 1, 2, 3, or more points, as compared to control, e.g., before and after treatment. In some embodiments, treatment refers to improvement in Ishak fibrosis score as compared to control, e.g., before and after treatment.

[0304] In normal or healthy individuals (e.g., individuals that do not possess the ZZ, MZ, or SZ allele), AAT levels vary between about 500 μg/ml to about 3000 μg/ml in the serum. Clinically, the level of circulating AAT can be measured by enzymologic or immunologic assay (e.g., ELISA), which methods are well known in the art. See, e.g., Stoller, J. and Aboussouan, L. (2005) Alpha1-antitrypsin deficiency. Lancet 365: 2225-2236; Kanakoudi F, Drossou V, Tzimouli V, et al: Serum concentrations of 10 acute-phase proteins in healthy term and pre-term infants from birth to age 6 months. Clin Chem 1995; 41:605-608; Morse J O: Alpha-1-antitrypsin deficiency. N Engl J Med 1978; 299:1045-1048, 1099-1105; Cox D W: Alpha-1-antitrypsin deficiency. In The Metabolic and Molecular Basis of Inherited Disease. Vol 3. Seventh edition. Edited by CR Scriver, AL Beaudet, WS Sly, D Valle. New York, McGraw-Hill Book Company, 1995, pp 4125-4158.

[0305] Accordingly, in some embodiments, the compositions and methods disclosed herein are useful for increasing serum or plasma levels of AAT (e.g., functional AAT or wild type AAT) in a subject having AATD (e.g., individuals that possess the ZZ, MZ, or SZ allele) or at risk of developing AATD (e.g., individuals that possess the ZZ, MZ, or SZ allele) to about 500 μg/ml, or more. In some embodiments, the compositions and methods disclosed herein are useful for increasing AAT protein levels to about 1500 μg/ml. In some embodiments, the compositions and methods disclosed herein are useful for increasing AAT protein levels to about 1000 μg/ml to about 1500 μg/ml, about 1500 μg/ml to about 2000 μg/ml, about 2000 μg/ml to about 2500 μg/ml, about 2500 μg/ml to about 3000 μg/ml, or more. For example, the compositions and methods disclosed herein are useful for increasing serum or plasma levels of AAT in a subject having an AATD to about 500, 550, 600, 650, 700, 750, 800, 850, 900, 950, 1000, 1100, 1200, 1300, 1400, 1500, 1600, 1700, 1800, 1900, 2000, 2100, 2200, 2300, 2400, 2500, 2600, 2700, 2800, 2900, 3000, g/ml, or more.

[0306] In some embodiments, the compositions and methods disclosed herein are useful for increasing serum or plasma levels of AAT in a subject having AATD (e.g., individuals that possess the ZZ, MZ, or SZ allele) or at risk of developing AATD (e.g., individuals that possess the ZZ, MZ, or SZ allele) by about 10%, 15%, 20%, 25%, 30%, 35%, 40%, 45%, 50%, 55%, 60%, 65%, 70%, 75%, 80%, 85%, 90%, 95%, 100%, 110%, 120%, 130%, 140%, 150%, 160%, 170%, 180%, 190%, 200%, or more, as compared to the subject's serum or plasma level of AAT before administration.

[0307] In some embodiments, the compositions and methods disclosed herein are useful for increasing heterologous functional AAT protein or AAT activity in a host cell by about 10%, 15%, 20%, 25%, 30%, 35%, 40%, 45%, 50%, 55%, 60%, 65%, 70%, 75%, 80%, 85%, 90%, 95%, 100%, 110%, 120%, 130%, 140%, 150%, 160%, 170%, 180%, 190%, 200%, or more, as compared to an AAT level before administration to the host cell, e.g. a normal level. In some embodiments, the cell is a liver cell.

[0308] In some embodiments, the cell (host cell) or population of cells is capable of expressing AAT, e.g., cells that originate from tissue of any one or more of liver, lung, gastric organ, kidney, stomach, proximal and distal small intestine, pancreas, adrenal glands, or brain.

[0309] In some embodiments, the method comprises administering a guide RNA and an RNA-guided DNA binding agent (such as an mRNA encoding a Cas9 nuclease) in an LNP. In further embodiments, the method comprises administering an AAV nucleic acid construct encoding a AAT protein, such as an bidirectional AAT construct. CRISPR/Cas9 LNP, comprising guide RNA and an mRNA encoding a Cas9, can be administered intravenously. AAV AAT donor construct can be administered intravenously. Exemplary dosing of CRISPR/Cas9 LNP includes about 0.1, 0.25, 0.3, 0.5, 1, 2, 3, 4, 5, 6, 8, or 10 mpk (RNA). The units mg/kg and mpk are being used interchangeably herein. Exemplary dosing of AAV comprising a nucleic acid encoding a AAT protein includes an MOI of about 10¹¹, 10¹², 10¹³, and 10¹⁴ vg/kg, optionally the MOI may be about 1×10¹³ to 1×10¹⁴ vg/kg.

[0310] In some embodiments, the method comprises expressing a therapeutically effective amount of the AAT protein. In some embodiments, the method comprises achieving a therapeutically effective level of circulating AAT activity in an individual. In particular embodiments, the method comprises achieving AAT activity of at least about 5% to about 50% of normal. The method may comprise achieving AAT activity of at least about 50% to about 150% of normal. In certain embodiments, the method comprises achieving an increase in AAT activity over the patient's baseline AAT activity of at least about 1% to about 50% of normal AAT activity, or at least about 5% to about 50% of normal AAT activity, or at least about 50% to about 150% of normal AAT activity.

[0311] In some embodiments, the method further comprises achieving a durable effect, e.g. at least 1 year. In some embodiments, the method further comprises achieving the therapeutic effect in a durable and sustained manner, e.g. at least 1 year. In some embodiments, the level of circulating AAT activity or level is stable for at least 1 year. In some embodiments a steady-state activity or level of AAT protein is achieved by at least 7 days, at least 14 days, or at least 28 days. In additional embodiments, the method comprises maintaining AAT activity or levels after a single dose for at least 1 year.

[0312] In additional embodiments involving insertion into the albumin locus, the individual's circulating albumin levels are normal. The method may comprise maintaining the individual's circulating albumin levels within ±5%, ±10%, ±15%, ±20%, or ±50% of normal circulating albumin levels. In certain embodiments, the individual's albumin levels are unchanged as compared to the albumin levels of untreated individuals by at least week 4, week 8, week 12, or week 20. In certain embodiments, the individual's albumin levels transiently drop then return to normal levels. In particular, the methods may comprise detecting no significant alterations in levels of plasma albumin.

[0313] In some embodiments, the methods provided herein comprise a method or use of modifying (e.g., creating a double strand break in) an albumin gene, such as a human albumin gene, comprising, administering or delivering to a host cell or population of host cells any one or more of the gRNAs, donor construct (e.g., bidirectional construct comprising a sequence encoding AAT), and RNA-guided DNA binding agents (e.g., Cas nuclease) described herein. In some embodiments, the method comprises a method or use of modifying (e.g., creating a double strand break in) an albumin intron 1 region, such as a human albumin intron 1, comprising, administering or delivering to a host cell or population of host cells any one or more of the gRNAs, donor construct (e.g., bidirectional construct comprising a sequence encoding AAT), and RNA-guided DNA binding agents (e.g., Cas nuclease) described herein. In some embodiments, the method comprises a method or use of modifying (e.g., creating a double strand break in) a human safe harbor, such as liver tissue or hepatocyte host cell, comprising, administering or delivering to a host cell or population of host cells any one or more of the gRNAs, donor construct (e.g., bidirectional construct comprising a sequence encoding AAT), and RNA-guided DNA binding agents (e.g., Cas nuclease) described herein. Insertion within a safe harbor locus, such as an albumin locus, allows overexpression of the SERPINA1 gene without significant deleterious effects on the host cell or cell population, such as liver cells.

[0314] In some embodiments, the present disclosure provides a method or use of modifying (e.g., creating a double strand break in) intron 1 of a human albumin locus comprising, administering or delivering to a host cell any one or more of the albumin gRNAs, donor construct (e.g., bidirectional construct comprising a sequence encoding a heterologous AAT), and RNA-guided DNA binding agents (e.g., Cas nuclease) described herein. In some embodiments, the albumin guide RNA comprises a guide sequence that contains at least 15, 16, 17, 18, 19, or 20 contiguous nucleotides that are capable of binding to a region within intron 1 of a human albumin locus (SEQ ID NO: 1). In some embodiments, the albumin guide RNA comprises at least 15, 16, 17, 18, 19, or 20 contiguous nucleotides of a sequence selected from the group consisting of SEQ ID NOs: 2-33. In some embodiments, the albumin guide RNA comprises a sequence that is at least 95% identical or 90% identical to a sequence selected from the group consisting of SEQ ID NOs: 2-33. In some embodiments, the albumin gRNA comprises a guide sequence comprising a sequence of any one of SEQ ID NOs.: 4, 13, 17, 19, 27, 28, 30, or 31. In some embodiments, the administration is in vitro. In some embodiments, the administration is in vivo. In some embodiments, the donor construct is a bidirectional construct that comprises a sequence encoding a heterologous AAT. In some embodiments, the host cell is a liver cell.

[0315] In some embodiments, the present disclosure provides a method or use of introducing a bidirectional nucleic acid construct provided herein to a host cell comprising, administering or delivering any one or more of the albumin gRNAs, donor construct (e.g., a bidirectional nucleic acid construct provided herein), and RNA-guided DNA binding agents (e.g., Cas nuclease) described herein. In some embodiments, the albumin gRNA comprises a guide sequence that contains at least 15, 16, 17, 18, 19, or 20 contiguous nucleotides that are capable of binding to a region within intron 1 of a human albumin locus (SEQ ID NO: 1). In some embodiments, the albumin guide RNA comprises at least 15, 16, 17, 18, 19, or 20 contiguous nucleotides of a sequence selected from the group consisting of SEQ ID NOs: 2-33. In some embodiments, the albumin guide RNA comprises a sequence that is at least 95% identical or 90% identical to a sequence selected from the group consisting of SEQ ID NOs: 2-33. In some embodiments, the albumin gRNA comprises a guide sequence comprising a sequence of any one of SEQ ID NOs.: 4, 13, 17, 19, 27, 28, 30, or 31. In some embodiments, the albumin gRNA comprising a sequence chosen from: a) a sequence that is at least 95%, 90%, 85%, 80%, or 75% identical to a sequence selected from the group consisting of SEQ ID NOs: 2, 8, 13, 19, 28, 29, 31, 32, or 33; b) at least 17, 18, 19, or 20 contiguous nucleotides of a sequence selected from the group consisting of SEQ ID NOs: 2, 8, 13, 19, 28, 29, 31, 32, or 33; c) a sequence selected from the group consisting of SEQ ID NOs: 34, 40, 45, 51, 60, 61, 63, 64, 65, 66, 72, 77, 83, 92, 93, 95, 96, or 97; d) a sequence that is at least 95%, 90%, 85%, 80%, or 75% identical to a sequence selected from the group consisting of SEQ ID NOs: 2-33; e) at least 17, 18, 19, or 20 contiguous nucleotides of a sequence selected from the group consisting of SEQ ID NOs: 2-33; f) a sequence selected from the group consisting of SEQ ID NOs: 34-97; and g) a sequence that is complementary to 15 consecutive nucleotides+/−5 nucleotides of the genomic coordinates listed for SEQ ID NOs: 2-33. In some embodiments, the host cell is a liver cell.

[0316] In some embodiments, the present disclosure provides a method or use of expressing a heterologous AAT (e.g., functional or wild type AAT) in a host cell comprising, administering or delivering any one or more of the albumin gRNAs, a bidirectional nucleic acid construct provided herein, and RNA-guided DNA binding agents (e.g., Cas nuclease) described herein. In some embodiments, the subject in need thereof is between birth and 2 years of age; between 2 to 12 years of age; or between 12 to 21 years of age. In some embodiments, the albumin gRNA comprises a guide sequence that contains at least 15, 16, 17, 18, 19, or 20 contiguous nucleotides that are capable of binding to a region within intron 1 of a human albumin locus (SEQ ID NO: 1). In some embodiments, the albumin gRNA comprises at least 15, 16, 17, 18, 19, or 20 contiguous nucleotides of a sequence selected from the group consisting of SEQ ID NOs: 2-33. In some embodiments, the albumin gRNA comprises a sequence that is at least 95% identical or 90% identical to a sequence selected from the group consisting of SEQ ID NOs: 2-33. In some embodiments, the albumin gRNA comprises a guide sequence comprising a sequence of any one of SEQ ID NOs: 4, 13, 17, 19, 27, 28, 30, or 31. In some embodiments, the albumin gRNA comprising a sequence chosen from: a) a sequence that is at least 95%, 90%, 85%, 80%, or 75% identical to a sequence selected from the group consisting of SEQ ID Nos: 2, 8, 13, 19, 28, 29, 31, 32, or 33; b) at least 17, 18, 19, or 20 contiguous nucleotides of a sequence selected from the group consisting of SEQ ID NOs: 2, 8, 13, 19, 28, 29, 31, 32, or 33; c) a sequence selected from the group consisting of SEQ ID NOs: 34, 40, 45, 51, 60, 61, 63, 64, 65, 66, 72, 77, 83, 92, 93, 95, 96, or 97; d) a sequence that is at least 95%, 90%, 85%, 80%, or 75% identical to a sequence selected from the group consisting of SEQ ID NOs: 2-33; e) at least 17, 18, 19, or 20 contiguous nucleotides of a sequence selected from the group consisting of SEQ ID NOs: 2-33; f) a sequence selected from the group consisting of SEQ ID NOs: 34-97; and g) a sequence that is complementary to 5, 6, 7, 8, 9, 10, 11, 12, 13, 14, 15, 16, 17, 18, 19, 20, 21, 22, 23, 24, or 25 consecutive nucleotides within or spanning the genomic coordinates listed for SEQ ID NOs: 2-33. In some embodiments, the administration is in vitro. In some embodiments, the administration is in vivo. In some embodiments, the host cell is a liver cell.

[0317] In some embodiments, the present disclosure provides a method or use of treating AATD comprising, administering or delivering a bidirectional nucleic acid construct provided herein, and RNA-guided DNA binding agents (e.g., Cas nuclease) described herein to a subject in need thereof. In some embodiments, the albumin gRNA comprises a guide sequence that contains at least 15, 16, 17, 18, 19, or 20 contiguous nucleotides that are capable of binding to a region within intron 1 of a mouse or a human albumin locus (SEQ ID NO: 1). In some embodiments, the albumin gRNA comprises at least 15, 16, 17, 18, 19, or 20 contiguous nucleotides of a sequence selected from the group consisting of SEQ ID NOs: 2-33. In some embodiments, the albumin gRNA comprises a sequence that is at least 95% identical or 90% identical to a sequence selected from the group consisting of SEQ ID NOs: 2-33. In some embodiments, the albumin gRNA comprises a guide sequence comprising a sequence of any one of SEQ ID NO: 4, 13, 17, 19, 27, 28, 30, or 31. In some embodiments, the albumin gRNA comprising a sequence chosen from: a) a sequence that is at least 95%, 90%, 85%, 80%, or 75% identical to a sequence selected from the group consisting of SEQ ID Nos: 2, 8, 13, 19, 28, 29, 31, 32, 33; b) at least 17, 18, 19, or 20 contiguous nucleotides of a sequence selected from the group consisting of SEQ ID NOs: 2, 8, 13, 19, 28, 29, 31, 32, 33; c) a sequence selected from the group consisting of SEQ ID NOs: 34, 40, 45, 51, 60, 61, 63, 64, 65, 66, 72, 77, 83, 92, 93, 95, 96, and 97; d) a sequence that is at least 95%, 90%, 85%, 80%, or 75% identical to a sequence selected from the group consisting of SEQ ID NOs: 2-33; e) at least 17, 18, 19, or 20 contiguous nucleotides of a sequence selected from the group consisting of SEQ ID NOs: 2-33; f) a sequence selected from the group consisting of SEQ ID NOs: 34-97; and g) a sequence that is complementary to 15 consecutive nucleotides+/−5 nucleotides of the genomic coordinates listed for SEQ ID NOs: 2-33. In some embodiments, the host cell is a liver cell.

[0318] In some embodiments, the present disclosure provides a method or use of increasing functional AAT secretion from a liver cell comprising, administering or delivering any one or more of the albumin gRNAs, a bidirectional nucleic acid construct provided herein, and RNA-guided DNA binding agents (e.g., Cas nuclease) described herein. In some embodiments, the albumin gRNA comprises a guide sequence that contains at least 15, 16, 17, 18, 19, or 20 contiguous nucleotides that are capable of binding to a region within intron 1 of a mouse or a human albumin locus (SEQ ID NO: 1). In some embodiments, the albumin gRNA comprises at least 15, 16, 17, 18, 19, or 20 contiguous nucleotides of a sequence selected from the group consisting of SEQ ID NOs: 2-33. In some embodiments, the albumin gRNA comprises a sequence that is at least 95% identical or 90% identical to a sequence selected from the group consisting of SEQ ID NOs: 2-33. In some embodiments, the albumin gRNA comprises a guide sequence comprising a sequence of any one of SEQ ID NO.: 4, 13, 17, 19, 27, 28, 30, or 31. In some embodiments, the administration is in vitro. In some embodiments, the administration is in vivo. In some embodiments, the host cell is a liver cell.

[0319] As described herein, the bidirectional nucleic acid construct provided herein, albumin gRNA, and RNA-guided DNA binding agent can be delivered using any suitable delivery system and method known in the art. The compositions can be delivered in vitro or in vivo simultaneously or in any sequential order. In some embodiments, the bidirectional nucleic acid construct provided herein, albumin gRNA, and Cas nuclease can be delivered in vitro or in vivo simultaneously, e.g., in one vector, two vectors, individual vectors, one LNP, two LNPs, individual LNPs, or a combination thereof. In some embodiments, the bidirectional nucleic acid construct provided herein can be delivered in vivo or in vitro, as a vector or associated with a LNP, prior to (e.g., about 1, 2, 3, 4, 5, 6, 7, 8, 9, 10, 11, 12, 13, 14, or more days) delivering the albumin gRNA or Cas nuclease, as a vector or associated with a LNP singly or together as a ribonucleoprotein (RNP). As a further example, the guide RNA and Cas nuclease, as a vector or associated with a LNP singly or together as a ribonucleoprotein (RNP), can be delivered in vivo or in vitro, prior to (e.g., about 1, 2, 3, 4, 5, 6, 7, 8, 9, 10, 11, 12, 13, 14, or more days) delivering the construct, as a vector or associated with a LNP. In some embodiments, the guide RNA and Cas nuclease are associated with an LNP and delivered to the host cell prior to delivering the bidirectional nucleic acid construct provided herein.

[0320] In some embodiments, the bidirectional nucleic acid construct provided herein comprises a sequence encoding a heterologous AAT, wherein the AAT sequence is wild type AAT, e.g., SEQ ID NO: 700 or 702. In some embodiments, the sequence encodes a functional variant of AAT. For example, the variant possesses increased trypsin inhibition activity than wild type AAT. In some embodiments, the sequence encodes an AAT variant that is 80%, 85%, 90%, 93%, 95%, 97%, 99% identical to SEQ ID NO: 702, having at least 80%, 85%, 90%, 92%, 94%, 96%, 98%, 99%, 100%, or more, activity as compared to wild type AAT. In some embodiments, the sequence encodes a functional fragment of AAT, wherein the fragment possesses at least 80%, 85%, 90%, 92%, 94%, 96%, 98%, 99%, 100%, or more, activity as compared to wild type AAT.

[0321] In some embodiments, the bidirectional nucleic acid construct provided herein is administered in a nucleic acid vector, such as an AAV vector, e.g., AAV8. In some embodiments, the donor construct does not comprise a homology arm.

[0322] In some embodiments, the subject is a mammal. In some embodiments, the subject is human.

[0323] In some embodiments, the bidirectional nucleic acid construct provided herein, albumin gRNA, and RNA-guided DNA binding agent are administered intravenously. In some embodiments, the bidirectional nucleic acid construct provided herein, albumin gRNA, and RNA-guided DNA binding agent are administered into the hepatic circulation.

[0324] In some embodiments, a single administration of a bidirectional nucleic acid construct provided herein, albumin gRNA, and RNA-guided DNA binding agent is sufficient to increase expression and secretion of AAT to a desirable level. In other embodiments, more than one administration of a composition comprising a bidirectional nucleic acid construct provided herein, albumin gRNA, and RNA-guided DNA binding agent may be beneficial to maximize therapeutic effects.

[0325] In some embodiments, multiple administrations of bidirectional nucleic acid construct provided herein, albumin gRNA, and RNA-guided DNA binding agent are used to increase expression and secretion of AAT to a desirable level or maximize editing via cumulative effects. In some embodiments, multiple administrations of an albumin guide RNA are used to increase expression and secretion of AAT to a desirable level or maximize editing via cumulative effects. In some embodiments, multiple administrations of a Cas nuclease are used to increase expression and secretion of AAT to a desirable level or maximize editing via cumulative effects.

[0326] In some embodiments, a method of treating AATD further includes administering a SERPINA1 guide RNA comprising any one or more of the guide sequences of SEQ ID Nos: 1000-1131. In some embodiments, SERPINA1 gRNAs comprising any one or more of the guide sequences of SEQ ID Nos: 1000-1131 administered to treat AATD. The SERPINA1 guide RNAs may be administered together with a Cas protein or an mRNA or vector encoding a Cas protein, such as, for example, Cas9.

[0327] In some embodiments, a method of treating AATD includes reducing or preventing the accumulation of AAT (e.g., mutant, non-functional AAT) in the serum, liver, liver tissue, liver cells, or hepatocytes of a subject is provided comprising administering a SERPINA1 guide RNA comprising any one or more of the guide sequences of SEQ ID NOs: 1000-1131. In some embodiments, SERPINA1 gRNAs comprising any one or more of the guide sequences of SEQ ID NOs: 1000-1131 are administered to reduce or prevent the accumulation of AAT (e.g., mutant, non-functional AAT) in the liver, liver tissue, liver cells, or hepatocytes. The gRNAs may be administered together with an RNA-guided DNA binding agent such as a Cas protein or an mRNA or vector encoding a Cas protein, such as, for example, Cas9.

[0328] In some embodiments, the SERPINA1 gRNAs comprising the guide sequences of Table 2 together with a Cas protein induce DSBs, and non-homologous ending joining (NHEJ) during repair leads to a mutation in the SERPINA1 gene. In some embodiments, NHEJ leads to a deletion or insertion of a nucleotide(s), which induces a frame shift or nonsense mutation in the SERPINA1 gene. In some embodiments, the gRNAs comprising the guide sequences of Table 2 together with a Cas protein induce DSBs, and NHEJ repair mediates insertion of the template nucleic acid construct. In some embodiments, insertion of the template nucleic acid increases secreted AAT protein levels. In some embodiments, insertion of the template nucleic acid increases secreted heterologous AAT protein levels. In some embodiments, insertion of the template nucleic acid increases blood, serum, or plasma AAT protein levels.

[0329] In some embodiments, administering the SERPINA1 guide RNAs disclosed herein reduces levels of endogenous alpha-1 antitrypsin (AAT) produced by the subject, and therefore prevents accumulation and aggregation of AAT in the liver.

[0330] In some embodiments, a single administration of the SERPINA1 guide RNA disclosed herein is sufficient to knock down expression of the endogenous protein. In some embodiments, a single administration of the SERPINA1 guide RNA disclosed herein is sufficient to knock down or knock out expression of the endogenous protein. In other embodiments, more than one administration of the SERPINA1 guide RNA disclosed herein may be beneficial to maximize editing via cumulative effects.

[0331] In some embodiments, endogenous AAT protein expression is reduced by administration of a nucleic acid therapeutic other than a guide RNA. In certain embodiments, the nucleic acid is an RNAi agent. Exemplary iRNA agents targeted to SERPINA1 are provided, for example, in WO2018098117, WO2015003113, and WO2015195628A2. Potent RNAi agents have been described targeting nucleotides 957-977, 1418-1424, and 1423-1435. Methods of making RNAi agents and their use for reducing expression of endogenous AAT protein in a subject and of treating AATD are provided in the cited publications and known in the art.

[0332] In some embodiments, administering the insertion guide RNAs disclosed herein increases levels of circulating alpha-1 antitrypsin (AAT) produced by the subject, and therefore prevents damage associated with high neutrophil elastase activity.

[0333] In some embodiments, a single administration or multiple administrations of an insertion guide RNA disclosed herein is sufficient to increase expression of a functional AAT protein. In some embodiments, a single administration or multiple administrations of the insertion guide RNA disclosed herein is sufficient to supplement or restore expression of the AAT protein activity. In some embodiments, the insertion guide RNA results in increased AAT serum levels, e.g., to protective levels (e.g., at or above 80 mg/dL as measured by immunodiffusion, at or above 50 mg/dL as measured using nephelometry or immunoturbidimetry and a purified standard). In some embodiments, the insertion guide RNA results in increased AAT serum levels, e.g., to normal levels (e.g., 150-350 mg/dL as measured by immunodiffusion, 90-200 mg/dL as measured using nephelometry or immunoturbidimetry and a purified standard). In some embodiments, the insertion guide RNA results in improvement in histologic grading of AATD associated liver disease, e.g., by 1, 2, 3, or more points, as compared to control, e.g., before and after treatment. In some embodiments, the insertion guide RNA results in improvement in Ishak fibrosis score as compared to control, e.g., before and after treatment. In some embodiments, a single administration improves lung disease measures, e.g., as assayed by pulmonary function testing (PFT), functional residual capacity (RFC), or lung density loss at total lung capacity (TLC). In other embodiments, more than one administration of the insertion guide RNA disclosed herein may be beneficial to maximize editing via cumulative effects.

[0334] In some embodiments, the efficacy of treatment with the compositions provided herein is seen at 1 year, 2 years, 3 years, 4 years, 5 years, or 10 years after delivery.

[0335] In some embodiments, treatment slow or halts lung disease progression associated with AATD. In some embodiments, lung disease is measured by changes in lung structure, lung function, or symptoms in the subject. In some embodiments, efficacy of treatment is measured by increased survival time of the subject.

[0336] In some embodiments, efficacy of treatment is measured by the slowing of development of pulmonary indications. In some embodiments, efficacy of treatment is measured by the slowing of development of pulmonary indications. In some embodiments, efficacy of treatment is measured by slowing progression in any one or more COPD, emphysema, or dyspnea. In some embodiments, efficacy of treatment is measured by improvement or stabilization in any one or more of cough, sputum production, or wheezing.

[0337] In some embodiments, treatment slows or halts liver disease progression. In some embodiments, treatment improves liver disease measures. In some embodiments, liver disease is measured by changes in liver structure, liver function, or symptoms in the subject.

[0338] In some embodiments, efficacy of treatment is measured by the ability to delay or avoid a liver transplantation in the subject. In some embodiments, efficacy of treatment is measured by increased survival time of the subject.

[0339] In some embodiments, efficacy of treatment is measured by reduction in liver enzymes in blood. In some embodiments, the liver enzymes are alanine transaminase (ALT) or aspartate transaminase (AST).

[0340] In some embodiments, efficacy of treatment is measured by the slowing of development of scar tissue or decrease in scar tissue in the liver based on biopsy results.

[0341] In some embodiments, efficacy of treatment is measured using patient-reported results such as fatigue, weakness, itching, loss of appetite, loss of appetite, weight loss, nausea, or bloating. In some embodiments, efficacy of treatment is measured by decreases in edema, ascites, or jaundice. In some embodiments, efficacy of treatment is measured by decreases in portal hypertension. In some embodiments, efficacy of treatment is measured by decreases in rates of liver cancer.

[0342] In some embodiments, efficacy of treatment is measured using imaging methods. In some embodiments, the imaging methods are ultrasound, computerized tomography, magnetic resonance imagery, or elastography.

[0343] In some embodiments, the serum or liver AAT levels (e.g., mutant, non-functional AAT) are reduced by 70-95%, 80-95%, 85-95%, 80-99%, or 85-99% as compared to serum or liver AAT levels (e.g., mutant, non-functional AAT) before administration of the composition.

[0344] In some embodiments, the percent editing of the SERPINA1 gene is 70-99%. In some embodiments, the percent editing is 70-95%, 80-95%, 85-95%, 80-99%, or 85-99%.

[0345] In some embodiments, the use of any one or more guide RNAs (albumin gRNA; or SERPINA1 gRNA) comprising any one or more of the guide sequences in Table 1 or Table 2, or Table 3 (e.g., in a composition provided herein) is provided for the preparation of a medicament for treating a human subject having AATD.

[0346] In some embodiments, the present disclosure provides combination therapies comprising any one or more of the gRNAs comprising any one or more of the guide sequences disclosed in Table 1 or Table 2 together with an augmentation therapy suitable for alleviating the lung symptoms of AATD. In some embodiments, the augmentation therapy for lung disease is intravenous therapy with AAT purified from human plasma, as described in Turner, BioDrugs 2013 December; 27(6):547-58. In some embodiments, the augmentation therapy is with Prolastin®, Zemaira®, Aralast®, or Kamada®.

[0347] In some embodiments, the combination therapy comprises any one or more of the gRNAs comprising any one or more of the guide sequences disclosed in Table 1 with a bidirectional construct comprising a first alpha-1 antitrypsin (AAT) polypeptide coding sequence and second alpha-1 antitrypsin (AAT) polypeptide coding sequence, together with a siRNA that targets a wild type ATT sequence. In some embodiments, the siRNA is any siRNA capable of further reducing or eliminating the expression of wild type or mutant AAT. In some embodiments, the siRNA is administered after any one or more of the gRNAs comprising any one or more of the guide sequences disclosed in Table 1 and the bidirectional construct. In some embodiments, the siRNA is administered on a regular basis following treatment with any of the gRNA compositions of Table 1 in and the bidirectional constructs provided herein

[0348] In some embodiments, the combination therapy comprises any one or more of the gRNAs comprising any one or more of the guide sequences disclosed in Table 1 with a bidirectional construct comprising a first alpha-1 antitrypsin (AAT) polypeptide coding sequence and second alpha-1 antitrypsin (AAT) polypeptide coding sequence together with one or more treatment for smoking cessation, preventive vaccinations, bronchodilators, supplemental oxygen when indicated, and physical rehabilitation in a program similar to that designed for patients with smoking-related COPD.

[0349] This description and exemplary embodiments should not be taken as limiting. For the purposes of this specification and appended embodiments, unless otherwise indicated, all numbers expressing quantities, percentages, or proportions, and other numerical values used in the specification and embodiments, are to be understood as being modified in all instances by the term “about,” to the extent they are not already so modified. Accordingly, unless indicated to the contrary, the numerical parameters set forth in the following specification and attached embodiments are approximations that may vary depending upon the desired properties sought to be obtained. At the very least, and not as an attempt to limit the application of the doctrine of equivalents to the scope of the embodiments, each numerical parameter should at least be construed in light of the number of reported significant digits and by applying ordinary rounding techniques.

Human AAT Protein Sequence
NCBI Ref: NP_000286:
(SEQ ID NO: 700)
MPSSVSWGILLLAGLCCLVPVSLAEDPQGDAAQKTDTSHHDQDHPTFNKITPNLAEF
AFSLYRQLAHQSNSTNIFFSPVSIATAFAMLSLGTKADTHDEILEGLNFNLTEIPEAQIH
EGFQELLRTLNQPDSQLQLTTGNGLFLSEGLKLVDKFLEDVKKLYHSEAFTVNFGDT
EEAKKQINDYVEKGTQGKIVDLVKELDRDTVFALVNYIFFKGKWERPFEVKDTEEED
FHVDQVTTVKVPMMKRLGMFNIQHCKKLSSWVLLMKYLGNATAIFFLPDEGKLQH
LENELTHDIITKFLENEDRRSASLHLPKLSITGTYDLKSVLGQLGITKVFSNGADLSGV
TEEAPLKLSKAVHKAVLTIDEKGTEAAGAMFLEAIPMSIPPEVKFNKPFVFLMIEQNT
KSPLFMGKVVNPTQK
Human AAT Nucleotide Sequence
NCBI Ref: NM_000295):
(SEQ ID NO: 701)
ACAATGACTCCTTTCGGTAAGTGCAGTGGAAGCTGTACACTGCCCAGGCAAAGC
GTCCGGGCAGCGTAGGCGGGCGACTCAGATCCCAGCCAGTGGACTTAGCCCCTG
TTTGCTCCTCCGATAACTGGGGTGACCTTGGTTAATATTCACCAGCAGCCTCCCC
CGTTGCCCCTCTGGATCCACTGCTTAAATACGGACGAGGACAGGGCCCTGTCTCC
TCAGCTTCAGGCACCACCACTGACCTGGGACAGTGAATCGACAATGCCGTCTTCT
GTCTCGTGGGGCATCCTCCTGCTGGCAGGCCTGTGCTGCCTGGTCCCTGTCTCCCT
GGCTGAGGATCCCCAGGGAGATGCTGCCCAGAAGACAGATACATCCCACCATGA
TCAGGATCACCCAACCTTCAACAAGATCACCCCCAACCTGGCTGAGTTCGCCTTC
AGCCTATACCGCCAGCTGGCACACCAGTCCAACAGCACCAATATCTTCTTCTCCC
CAGTGAGCATCGCTACAGCCTTTGCAATGCTCTCCCTGGGGACCAAGGCTGACAC
TCACGATGAAATCCTGGAGGGCCTGAATTTCAACCTCACGGAGATTCCGGAGGC
TCAGATCCATGAAGGCTTCCAGGAACTCCTCCGTACCCTCAACCAGCCAGACAGC
CAGCTCCAGCTGACCACCGGCAATGGCCTGTTCCTCAGCGAGGGCCTGAAGCTA
GTGGATAAGTTTTTGGAGGATGTTAAAAAGTTGTACCACTCAGAAGCCTTCACTG
TCAACTTCGGGGACACCGAAGAGGCCAAGAAACAGATCAACGATTACGTGGAGA
AGGGTACTCAAGGGAAAATTGTGGATTTGGTCAAGGAGCTTGACAGAGACACAG
TTTTTGCTCTGGTGAATTACATCTTCTTTAAAGGCAAATGGGAGAGACCCTTTGA
AGTCAAGGACACCGAGGAAGAGGACTTCCACGTGGACCAGGTGACCACCGTGAA
GGTGCCTATGATGAAGCGTTTAGGCATGTTTAACATCCAGCACTGTAAGAAGCTG
TCCAGCTGGGTGCTGCTGATGAAATACCTGGGCAATGCCACCGCCATCTTCTTCC
TGCCTGATGAGGGGAAACTACAGCACCTGGAAAATGAACTCACCCACGATATCA
TCACCAAGTTCCTGGAAAATGAAGACAGAAGGTCTGCCAGCTTACATTTACCCA
AACTGTCCATTACTGGAACCTATGATCTGAAGAGCGTCCTGGGTCAACTGGGCAT
CACTAAGGTCTTCAGCAATGGGGCTGACCTCTCCGGGGTCACAGAGGAGGCACC
CCTGAAGCTCTCCAAGGCCGTGCATAAGGCTGTGCTGACCATCGACGAGAAAGG
GACTGAAGCTGCTGGGGCCATGTTTTTAGAGGCCATACCCATGTCTATCCCCCCC
GAGGTCAAGTTCAACAAACCCTTTGTCTTCTTAATGATTGAACAAAATACCAAGT
CTCCCCTCTTCATGGGAAAAGTGGTGAATCCCACCCAAAAATAACTGCCTCTCGC
TCCTCAACCCCTCCCCTCCATCCCTGGCCCCCTCCCTGGATGACATTAAAGAAGG
GTTGAGCTGGTCCCTGCCTGCATGTGACTGTAAATCCCTCCCATGTTTTCTCTGAG
TCTCCCTTTGCCTGCTGAGGCTGTATGTGGGCTCCAGGTAACAGTGCTGTCTTCG
GGCCCCCTGAACTGTGTTCATGGAGCATCTGGCTGGGTAGGCACATGCTGGGCTT
GAATCCAGGGGGGACTGAATCCTCAGCTTACGGACCTGGGCCCATCTGTTTCTGG
AGGGCTCCAGTCTTCCTTGTCCTGTCTTGGAGTCCCCAAGAAGGAATCACAGGGG
AGGAACCAGATACCAGCCATGACCCCAGGCTCCACCAAGCATCTTCATGTCCCCC
TGCTCATCCCCCACTCCCCCCCACCCAGAGTTGCTCATCCTGCCAGGGCTGGCTG
TGCCCACCCCAAGGCTGCCCTCCTGGGGGCCCCAGAACTGCCTGATCGTGCCGTG
GCCCAGTTTTGTGGCATCTGCAGCAACACAAGAGAGAGGACAATGTCCTCCTCTT
GACCCGCTGTCACCTAACCAGACTCGGGCCCTGCACCTCTCAGGCACTTCTGGAA
AATGACTGAGGCAGATTCTTCCTGAAGCCCATTCTCCATGGGGCAACAAGGACA
CCTATTCTGTCCTTGTCCTTCCATCGCTGCCCCAGAAAGCCTCACATATCTCCGTT
TAGAATCAGGTCCCTTCTCCCCAGATGAAGAGGAGGGTCTCTGCTTTGTTTTCTCT
ATCTCCTCCTCAGACTTGACCAGGCCCAGCAGGCCCCAGAAGACCATTACCCTAT
ATCCCTTCTCCTCCCTAGTCACATGGCCATAGGCCTGCTGATGGCTCAGGAAGGC
CATTGCAAGGACTCCTCAGCTATGGGAGAGGAAGCACATCACCCATTGACCCCC
GCAACCCCTCCCTTTCCTCCTCTGAGTCCCGACTGGGGCCACATGCAGCCTGACT
TCTTTGTGCCTGTTGCTGTCCCTGCAGTCTTCAGAGGGCCACCGCAGCTCCAGTG
CCACGGCAGGAGGCTGTTCCTGAATAGCCCCTGTGGTAAGGGCCAGGAGAGTCC
TTCCATCCTCCAAGGCCCTGCTAAAGGACACAGCAGCCAGGAAGTCCCCTGGGC
CCCTAGCTGAAGGACAGCCTGCTCCCTCCGTCTCTACCAGGAATGGCCTTGTCCT
ATGGAAGGCACTGCCCCATCCCAAACTAATCTAGGAATCACTGTCTAACCACTCA
CTGTCATGAATGTGTACTTAAAGGATGAGGTTGAGTCATACCAAATAGTGATTTC
GATAGTTCAAAATGGTGAAATTAGCAATTCTACATGATTCAGTCTAATCAATGGA
TACCGACTGTTTCCCACACAAGTCTCCTGTTCTCTTAAGCTTACTCACTGACAGCC
TTTCACTCTCCACAAATACATTAAAGATATGGCCATCACCAAGCCCCCTAGGATG
ACACCAGACCTGAGAGTCTGAAGACCTGGATCCAAGTTCTGACTTTTCCCCCTGA
CAGCTGTGTGACCTTCGTGAAGTCGCCAAACCTCTCTGAGCCCCAGTCATTGCTA
GTAAGACCTGCCTTTGAGTTGGTATGATGTTCAAGTTAGATAACAAAATGTTTAT
ACCCATTAGAACAGAGAATAAATAGAACTACATTTCTTGCA
Alpha 1-antitrypsin polypeptide encoded by P00450
(SEQ ID NO: 702):
EDPQGDAAQKTDTSHHDQDHPTFNKITPNLAEFAFSLYRQLAHQSNSTNIFFSPVSIA
TAFAMLSLGTKADTHDEILEGLNFNLTEIPEAQIHEGFQELLRTLNQPDSQLQLTTGN
GLFLSEGLKLVDKFLEDVKKLYHSEAFTVNFGDTEEAKKQINDYVEKGTQGKIVDLV
KELDRDTVFALVNYIFFKGKWERPFEVKDTEEEDFHVDQVTTVKVPMMKRLGMFNI
QHCKKLSSWVLLMKYLGNATAIFFLPDEGKLQHLENELTHDIITKFLENEDRRSASL
HLPKLSITGTYDLKSVLGQLGITKVFSNGADLSGVTEEAPLKLSKAVHKAVLTIDEKG
TEAAGAMFLEAIPMSIPPEVKFNKPFVFLMIEQNTKSPLFMGKVVNPTQK
Human AAT Nucleotide Sequence
NCBI Ref: NM_001127700.2):
(SEQ ID NO: 703)
AGAGTCCTGAGCTGAACCAAGAAGGAGGAGGGGGTCGGGCCTCCGAGGAAGGC
CTAGCCGCTGCTGCTGCCAGGAATTCCAGGTTGGAGGGGCGGCAACCTCCTGCC
AGCCTTCAGGCCACTCTCCTGTGCCTGCCAGAAGAGACAGAGCTTGAGGAGAGC
TTGAGGAGAGCAGGAAAGGTGGGACATTGCTGCTGCTGCTCACTCAGTTCCACA
GGACAATGCCGTCTTCTGTCTCGTGGGGCATCCTCCTGCTGGCAGGCCTGTGCTG
CCTGGTCCCTGTCTCCCTGGCTGAGGATCCCCAGGGAGATGCTGCCCAGAAGACA
GATACATCCCACCATGATCAGGATCACCCAACCTTCAACAAGATCACCCCCAACC
TGGCTGAGTTCGCCTTCAGCCTATACCGCCAGCTGGCACACCAGTCCAACAGCAC
CAATATCTTCTTCTCCCCAGTGAGCATCGCTACAGCCTTTGCAATGCTCTCCCTGG
GGACCAAGGCTGACACTCACGATGAAATCCTGGAGGGCCTGAATTTCAACCTCA
CGGAGATTCCGGAGGCTCAGATCCATGAAGGCTTCCAGGAACTCCTCCGTACCCT
CAACCAGCCAGACAGCCAGCTCCAGCTGACCACCGGCAATGGCCTGTTCCTCAG
CGAGGGCCTGAAGCTAGTGGATAAGTTTTTGGAGGATGTTAAAAAGTTGTACCA
CTCAGAAGCCTTCACTGTCAACTTCGGGGACACCGAAGAGGCCAAGAAACAGAT
CAACGATTACGTGGAGAAGGGTACTCAAGGGAAAATTGTGGATTTGGTCAAGGA
GCTTGACAGAGACACAGTTTTTGCTCTGGTGAATTACATCTTCTTTAAAGGCAAA
TGGGAGAGACCCTTTGAAGTCAAGGACACCGAGGAAGAGGACTTCCACGTGGAC
CAGGTGACCACCGTGAAGGTGCCTATGATGAAGCGTTTAGGCATGTTTAACATCC
AGCACTGTAAGAAGCTGTCCAGCTGGGTGCTGCTGATGAAATACCTGGGCAATG
CCACCGCCATCTTCTTCCTGCCTGATGAGGGGAAACTACAGCACCTGGAAAATGA
ACTCACCCACGATATCATCACCAAGTTCCTGGAAAATGAAGACAGAAGGTCTGC
CAGCTTACATTTACCCAAACTGTCCATTACTGGAACCTATGATCTGAAGAGCGTC
CTGGGTCAACTGGGCATCACTAAGGTCTTCAGCAATGGGGCTGACCTCTCCGGGG
TCACAGAGGAGGCACCCCTGAAGCTCTCCAAGGCCGTGCATAAGGCTGTGCTGA
CCATCGACGAGAAAGGGACTGAAGCTGCTGGGGCCATGTTTTTAGAGGCCATAC
CCATGTCTATCCCCCCCGAGGTCAAGTTCAACAAACCCTTTGTCTTCTTAATGATT
GAACAAAATACCAAGTCTCCCCTCTTCATGGGAAAAGTGGTGAATCCCACCCAA
AAATAACTGCCTCTCGCTCCTCAACCCCTCCCCTCCATCCCTGGCCCCCTCCCTGG
ATGACATTAAAGAAGGGTTGAGCTGGTCCCTGCCTGCATGTGACTGTAAATCCCT
CCCATGTTTTCTCTGAGTCTCCCTTTGCCTGCTGAGGCTGTATGTGGGCTCCAGGT
AACAGTGCTGTCTTCGGGCCCCCTGAACTGTGTTCATGGAGCATCTGGCTGGGTA
GGCACATGCTGGGCTTGAATCCAGGGGGGACTGAATCCTCAGCTTACGGACCTG
GGCCCATCTGTTTCTGGAGGGCTCCAGTCTTCCTTGTCCTGTCTTGGAGTCCCCAA
GAAGGAATCACAGGGGAGGAACCAGATACCAGCCATGACCCCAGGCTCCACCA
AGCATCTTCATGTCCCCCTGCTCATCCCCCACTCCCCCCCACCCAGAGTTGCTCAT
CCTGCCAGGGCTGGCTGTGCCCACCCCAAGGCTGCCCTCCTGGGGGCCCCAGAA
CTGCCTGATCGTGCCGTGGCCCAGTTTTGTGGCATCTGCAGCAACACAAGAGAGA
GGACAATGTCCTCCTCTTGACCCGCTGTCACCTAACCAGACTCGGGCCCTGCACC
TCTCAGGCACTTCTGGAAAATGACTGAGGCAGATTCTTCCTGAAGCCCATTCTCC
ATGGGGCAACAAGGACACCTATTCTGTCCTTGTCCTTCCATCGCTGCCCCAGAAA
GCCTCACATATCTCCGTTTAGAATCAGGTCCCTTCTCCCCAGATGAAGAGGAGGG
TCTCTGCTTTGTTTTCTCTATCTCCTCCTCAGACTTGACCAGGCCCAGCAGGCCCC
AGAAGACCATTACCCTATATCCCTTCTCCTCCCTAGTCACATGGCCATAGGCCTG
CTGATGGCTCAGGAAGGCCATTGCAAGGACTCCTCAGCTATGGGAGAGGAAGCA
CATCACCCATTGACCCCCGCAACCCCTCCCTTTCCTCCTCTGAGTCCCGACTGGG
GCCACATGCAGCCTGACTTCTTTGTGCCTGTTGCTGTCCCTGCAGTCTTCAGAGG
GCCACCGCAGCTCCAGTGCCACGGCAGGAGGCTGTTCCTGAATAGCCCCTGTGGT
AAGGGCCAGGAGAGTCCTTCCATCCTCCAAGGCCCTGCTAAAGGACACAGCAGC
CAGGAAGTCCCCTGGGCCCCTAGCTGAAGGACAGCCTGCTCCCTCCGTCTCTACC
AGGAATGGCCTTGTCCTATGGAAGGCACTGCCCCATCCCAAACTAATCTAGGAAT
CACTGTCTAACCACTCACTGTCATGAATGTGTACTTAAAGGATGAGGTTGAGTCA
TACCAAATAGTGATTTCGATAGTTCAAAATGGTGAAATTAGCAATTCTACATGAT
TCAGTCTAATCAATGGATACCGACTGTTTCCCACACAAGTCTCCTGTTCTCTTAAG
CTTACTCACTGACAGCCTTTCACTCTCCACAAATACATTAAAGATATGGCCATCA
CCAAGCCCCCTAGGATGACACCAGACCTGAGAGTCTGAAGACCTGGATCCAAGT
TCTGACTTTTCCCCCTGACAGCTGTGTGACCTTCGTGAAGTCGCCAAACCTCTCTG
AGCCCCAGTCATTGCTAGTAAGACCTGCCTTTGAGTTGGTATGATGTTCAAGTTA
GATAACAAAATGTTTATACCCATTAGAACAGAGAATAAATAGAACTACATTTCTT
GCA
Human AAT Protein Signal Sequence
(SEQ ID NO: 705)
MPSSVSWGILLLAGLCCLVPVSLA

TABLE 9A

| Construct | Description | Annotation | Sequence |
|---|---|---|---|
| 1 | Full | SEQ ID NO: | aagtggtggcctaactacggctacactagaagaacagtatttggtatctgcgctctgctgaagccagttaccttcggaaaaagagttggtagctcttgatc |
| | Sequence | 710 | cggcaaacaaaccaccgctggtagcggtggtttttttgtttgcaagcagcagattacgcgcagaaaaaaaggatctcaagaagatcctttgatcttttcta |
| | | | cggggtctgacgctcagtggaacgaaaactcacgttaagggattttggtcatgagattatcaaaaaggatcttcacctagatccttttaaattaaaaatg |
| | | | aagttttaaatcaagcccaatctgaataatgttacaaccaattaaccaattctgattagaaaaactcatcgagcatcaaatgaaactgcaatttattcata |
| | | | tcaggattatcaataccatatttttgaaaaagccgtttctgtaatgaaggagaaaactcaccgaggcagttccataggatggcaagatcctggtatcggt |
| | | | ctgcgattccgactcgtccaacatcaatacaacctattaatttcccctcgtcaaaaataaggttatcaagtgagaaatcaccatgagtgacgactgaatcc |
| | | | ggtgagaatggcaaaagtttatgcatttctttccagacttgttcaacaggccagccattacgctcgtcatcaaaatcactcgcatcaaccaaaccgttattc |
| | | | attcgtgattgcgcctgagcgagacgaaatacgcgatcgctgttaaaaggacaattacaaacaggaatcgaatgcaaccggcgcaggaacactgccag |
| | | | cgcatcaacaatattttcacctgaatcaggatattcttctaatacctggaatgctgtttttccggggatcgcagtggtgagtaaccatgcatcatcaggagt |
| | | | acggataaaatgcttgatggtcggaagaggcataaattccgtcagccagtttagtctgaccatctcatctgtaacatcattggcaacgctacctttgccat |
| | | | gtttcagaaacaactctggcgcatcgggcttcccatacaagcgatagattgtcgcacctgattgcccgacattatcgcgagcccatttatacccatataaa |
| | | | tcagcatccatgttggaatttaatcgcggcctcgacgtttcccgttgaatatggctcataacaccccttgtattactgtttatgtaagcagacagttttattgt |
| | | | tcatgatgatatatttttatcttgtgcaatgtaacatcagagattttgagacacgggccagagctgcatcgcgcgtttcggtgatgacggtgaaaacctctg |
| | | | acacatgcagctcccggagacggtcacagcttgtctgtaagcggatgccgggagcagacaagcccgtcagggcgcgtcagcgggtgttggcgggtgtc |
| | | | ggggctggcttaactatgcggcatcagagcagattgtactgagagtgcaccatatgcggtgtgaaataccgcacagatgcgtaaggagaaaataccgc |
| | | | atcaggcgccattcgccattcaggctgcgcaactgttgggaagggcgatcggtgcgggcctcttcgctattacgccagctggcgaaagggggatgtgctg |
| | | | caaggcgattaagttgggtaacgccagggttttcccagtcacgacgttgtaaaacgacggccagagaattcTTGGCCACTCCCTCTCTGCGCG |
| | | | CTCGCTCGCTCACTGAGGCCGGGCGACCAAAGGTCGCCCGACGCCCGGGCTTTGCCCGGGCGGCCTCAGTGAGCGA |
| | | | GCGAGCGCGCAGAGAGGGAGTGGCCAACTCCATCACTAGGGGTTCCTAGATCTACTAGTtaggtcagtgaagagaagaac |
| | | | aaaaagcagcatattacagttagttgtcttcatcaatctttaaatatgttgtgtggtttttctctccctgtttccacagttGAGGACCCCCAGGGCGA |
| | | | CGCCGCCCAGAAGACCGACACCAGCCACCACGACCAGGACCACCCCACCTTCAACAAGATCACCCCCAACCTGGCCG |
| | | | AGTTCGCCTTCAGCCTGTACAGGCAGCTGGCCCACCAGAGCAACAGCACCAACATCTTCTTCAGCCCCGTGAGCATC |
| | | | GCCACCGCCTTCGCCATGCTGAGCCTGGGCACCAAGGCCGACACCCACGACGAGATCCTGGAGGGCCTGAACTTCA |
| | | | ACCTGACCGAGATCCCCGAGGCCCAGATCCACGAGGGCTTCCAGGAGCTGCTGAGGACCCTGAACCAGCCCGACAG |
| | | | CCAGCTGCAGCTGACCACCGGCAACGGCCTGTTCCTGAGCGAGGGCCTGAAGCTGGTGGACAAGTTCCTGGAGGAC |
| | | | GTGAAGAAGCTGTACCACAGCGAGGCCTTCACCGTGAACTTCGGCGACACCGAGGAGGCCAAGAAGCAGATCAAC |
| | | | GACTACGTGGAGAAGGGCACCCAGGGCAAGATCGTGGACCTGGTGAAGGAGCTGGACAGGGACACCGTGTTCGCC |
| | | | CTGGTGAACTACATCTTCTTCAAGGGCAAGTGGGAGAGGCCCTTCGAGGTGAAGGACACCGAGGAGGAGGACTTC |
| | | | CACGTGGACCAGGTGACCACCGTGAAGGTGCCCATGATGAAGAGGCTGGGCATGTTCAACATCCAGCACTGCAAGA |
| | | | AGCTGAGCAGCTGGGTGCTGCTGATGAAGTACCTGGGCAACGCCACCGCCATCTTCTTCCTGCCCGACGAGGGCAA |
| | | | GCTGCAGCACCTGGAGAACGAGCTGACCCACGACATCATCACCAAGTTCCTGGAGAACGAGGACAGGAGGAGCGC |
| | | | CAGCCTGCACCTGCCCAAGCTGAGCATCACCGGCACCTACGACCTGAAGAGCGTGCTGGGCCAGCTGGGCATCACC |
| | | | AAGGTGTTCAGCAACGGCGCCGACCTGAGCGGCGTGACCGAGGAGGCCCCCCTGAAGCTGAGCAAGGCCGTGCAC |
| | | | AAGGCCGTGCTGACCATCGACGAGAAGGGCACCGAGGCCGCCGGCGCCATGTTCCTGGAGGCCATCCCCATGAGC |
| | | | ATCCCCCCCGAGGTGAAGTTCAACAAGCCCTTCGTGTTCCTGATGATCGAGCAGAACACCAAGAGCCCCCTGTTCAT |
| | | | GGGCAAGGTGGTGAACCCCACCCAGAAGTAACAGACATGATAAGATACATTGATGAGTTTGGACAAACCACAACTA |
| | | | GAATGCAGTGAAAAAAATGCTTTATTTGTGAAATTTGTGATGCTATTGCTTTATTTGTAACCATTATAAGCTGCAATA |
| | | | AACAAGTTAACAACAACAATTGCATTCATTTTATGTTTCAGGTTCAGGGGGAGGTGTGGGAGGTTTTTTggggatacccc |
| | | | ctagagccccagctggttctttccgcctcagaagCCATAGAGCCCACCGCATCCCCAGCATGCCTGCTATTGTCTTCCCAATCCTC |
| | | | CCCCTTGCTGTCCTGCCCCACCCCACCCCCCAGAATAGAATGACACCTACTCAGACAATGCGATGCAATTTCCTCATTT |
| | | | TATTAGGAAAGGACAGTGGGAGTGGCACCTTCCAGGGTCAAGGAAGGCACGGGGGAGGGGCAAACAACAGATGG |
| | | | CTGGCAACTAGAAGGCACAGTCGaggttaTTTTTGGGTGGGATTCACCACTTTTCCCATGAAGAGGGGAGACTTGGTA |
| | | | TTTTGTTCAATCATTAAGAAGACAAAGGGTTTGTTGAACTTGACCTCGGGGGGGATAGACATGGGTATGGCCTCTAA |
| | | | AAACATGGCCCCAGCAGCTTCAGTCCCTTTCTCGTCGATGGTCAGCACAGCCTTATGCACGGCCTTGGAGAGCTTCA |
| | | | GGGGTGCCTCCTCTGTGACCCCGGAGAGGTCAGCCCCATTGCTGAAGACCTTAGTGATGCCCAGTTGACCCAGGAC |
| | | | GCTCTTCAGATCATAGGTTCCAGTAATGGACAGTTTGGGTAAATGTAAGCTGGCAGACCTTCTGTCTTCATTTTCCAG |
| | | | GAACTTGGTGATGATATCGTGGGTGAGTTCATTTTCCAGGTGCTGTAGTTTCCCCTCATCAGGCAGGAAGAAGATGG |
| | | | CGGTGGCATTGCCCAGGTATTTCATCAGCAGCACCCAGCTGGACAGCTTCTTACAGTGCTGGATGTTAAACATGCCT |
| | | | AAACGCTTCATCATAGGCACCTTCACGGTGGTCACCTGGTCCACGTGGAAGTCCTCTTCCTCGGTGTCCTTGACTTCA |
| | | | AAGGGTCTCTCCCATTTGCCTTTAAAGAAGATGTAATTCACCAGAGCAAAAACTGTGTCTCTGTCAAGCTCCTTGACC |
| | | | AAATCCACAATTTTCCCTTGAGTACCCTTCTCCACGTAATCGTTGATCTGTTTCTTGGCCTCTTCGGTGTCCCCGAAGT |
| | | | TGACAGTGAAGGCTTCTGAGTGGTACAACTTTTTAACATCCTCCAAAAACTTATCCACTAGCTTCAGGCCCTCGCTGA |
| | | | GGAACAGGCCATTGCCGGTGGTCAGCTGGAGCTGGCTGTCTGGCTGGTTGAGGGTACGGAGGAGTTCCTGGAAGC |
| | | | CTTCATGGATCTGAGCCTCCGGAATCTCCGTGAGGTTGAAATTCAGGCCCTCCAGGATTTCATCGTGAGTGTCAGCC |
| | | | TTGGTCCCCAGGGAGAGCATTGCAAAGGCTGTAGCGATGCTCACTGGGGAGAAGAAGATATTGGTGCTGTTGGACT |
| | | | GGTGTGCCAGCTGGCGGTATAGGCTGAAGGCGAACTCAGCCAGGTTGGGGGTGATCTTGTTGAAGGTTGGGTGAT |
| | | | CCTGATCATGGTGGGATGTATCTGTCTTCTGGGCAGCATCTCCCTGGGGATCCTCaactgtggaaacagggagagaaaaacc |
| | | | acacaacatatttaaagattgatgaagacaactaactgtaatatgctgctttttgttcttctcttcactgacctaACTAGTAGATCTAGGAACCCC |
| | | | TAGTGATGGAGTTGGCCACTCCCTCTCTGCGCGCTCGCTCGCTCACTGAGGCCGCCCGGGCAAAGCCCGGGCGTCG |
| | | | GGCGACCTTTGGTCGCCCGGCCTCAGTGAGCGAGCGAGCGCGCAGAGAGGGAGTGGCCAAacgcgtggtgtaatcatggt |
| | | | catagctgtttcctgtgtgaaattgttatccgctcacaattccacacaacatacgagccggaagcataaagtgtaaagcctggggtgcctaatgagtgag |
| | | | ctaactcacattaattgcgttgcgctcactgcccgctttccagtcgggaaacctgtcgtgccagctgcattaatgaatcggccaacgcgcggggagaggc |
| | | | ggtttgcgtattgggcgctcttccgcttcctcgctcactgactcgctgcgctcggtcgttcggctgcggcgagcggtatcagctcactcaaaggcggtaata |
| | | | cggttatccacagaatcaggggataacgcaggaaagaacatgtgagcaaaaggccagcaaaaggccaggaaccgtaaaaaggccgcgttgctggcg |
| | | | tttttccataggctccgcccccctgacgagcatcacaaaaatcgacgctcaagtcagaggtggcgaaacccgacaggactataaagataccaggcgttt |
| | | | ccccctggaagctccctcgtgcgctctcctgttccgaccctgccgcttaccggatacctgtccgcctttctcccttcgggaagcgtggcgctttctcatagctc |
| | | | acgctgtaggtatctcagttcggtgtaggtcgttcgctccaagctgggctgtgtgcacgaaccccccgttcagcccgaccgctgcgccttatccggtaacta |
| | | | tcgtcttgagtccaacccggtaagacacgacttatcgccactggcagcagccactggtaacaggattagcagagcgaggtatgtaggcggtgctacaga |
| | | | gttcttg |
| | SERPINA1 | A1AT w/o | GAGGACCCCCAGGGCGACGCCGCCCAGAAGACCGACACCAGCCACCACGACCAGGACCACCCCACCTTCAACAAGA |
| | copy 1 | SP | TCACCCCCAACCTGGCCGAGTTCGCCTTCAGCCTGTACAGGCAGCTGGCCCACCAGAGCAACAGCACCAACATCTTC |
| | | (alternate | TTCAGCCCCGTGAGCATCGCCACCGCCTTCGCCATGCTGAGCCTGGGCACCAAGGCCGACACCCACGACGAGATCCT |
| | | codon usage | GGAGGGCCTGAACTTCAACCTGACCGAGATCCCCGAGGCCCAGATCCACGAGGGCTTCCAGGAGCTGCTGAGGACC |
| | | 1) | CTGAACCAGCCCGACAGCCAGCTGCAGCTGACCACCGGCAACGGCCTGTTCCTGAGCGAGGGCCTGAAGCTGGTGG |
| | | (SEQ ID NO: | ACAAGTTCCTGGAGGACGTGAAGAAGCTGTACCACAGCGAGGCCTTCACCGTGAACTTCGGCGACACCGAGGAGG |
| | | 711) | CCAAGAAGCAGATCAACGACTACGTGGAGAAGGGCACCCAGGGCAAGATCGTGGACCTGGTGAAGGAGCTGGAC |
| | | | AGGGACACCGTGTTCGCCCTGGTGAACTACATCTTCTTCAAGGGCAAGTGGGAGAGGCCCTTCGAGGTGAAGGACA |
| | | | CCGAGGAGGAGGACTTCCACGTGGACCAGGTGACCACCGTGAAGGTGCCCATGATGAAGAGGCTGGGCATGTTCA |
| | | | ACATCCAGCACTGCAAGAAGCTGAGCAGCTGGGTGCTGCTGATGAAGTACCTGGGCAACGCCACCGCCATCTTCTTC |
| | | | CTGCCCGACGAGGGCAAGCTGCAGCACCTGGAGAACGAGCTGACCCACGACATCATCACCAAGTTCCTGGAGAACG |
| | | | AGGACAGGAGGAGCGCCAGCCTGCACCTGCCCAAGCTGAGCATCACCGGCACCTACGACCTGAAGAGCGTGCTGG |
| | | | GCCAGCTGGGCATCACCAAGGTGTTCAGCAACGGCGCCGACCTGAGCGGCGTGACCGAGGAGGCCCCCCTGAAGC |
| | | | TGAGCAAGGCCGTGCACAAGGCCGTGCTGACCATCGACGAGAAGGGCACCGAGGCCGCCGGCGCCATGTTCCTGG |
| | | | AGGCCATCCCCATGAGCATCCCCCCCGAGGTGAAGTTCAACAAGCCCTTCGTGTTCCTGATGATCGAGCAGAACACC |
| | | | AAGAGCCCCCTGTTCATGGGCAAGGTGGTGAACCCCACCCAGAAGTAA |
| | SERPINA1 | A1AT w/o | GAGGATCCCCAGGGAGATGCTGCCCAGAAGACAGATACATCCCACCATGATCAGGATCACCCAACCTTCAACAAGA |
| | copy 2 (rev | SP | TCACCCCCAACCTGGCTGAGTTCGCCTTCAGCCTATACCGCCAGCTGGCACACCAGTCCAACAGCACCAATATCTTCT |
| | comp) | (SEQ ID NO: | TCTCCCCAGTGAGCATCGCTACAGCCTTTGCAATGCTCTCCCTGGGGACCAAGGCTGACACTCACGATGAAATCCTG |
| | | 712) | GAGGGCCTGAATTTCAACCTCACGGAGATTCCGGAGGCTCAGATCCATGAAGGCTTCCAGGAACTCCTCCGTACCCT |
| | | | CAACCAGCCAGACAGCCAGCTCCAGCTGACCACCGGCAATGGCCTGTTCCTCAGCGAGGGCCTGAAGCTAGTGGAT |
| | | | AAGTTTTTGGAGGATGTTAAAAAGTTGTACCACTCAGAAGCCTTCACTGTCAACTTCGGGGACACCGAAGAGGCCAA |
| | | | GAAACAGATCAACGATTACGTGGAGAAGGGTACTCAAGGGAAAATTGTGGATTTGGTCAAGGAGCTTGACAGAGA |
| | | | CACAGTTTTTGCTCTGGTGAATTACATCTTCTTTAAAGGCAAATGGGAGAGACCCTTTGAAGTCAAGGACACCGAGG |
| | | | AAGAGGACTTCCACGTGGACCAGGTGACCACCGTGAAGGTGCCTATGATGAAGCGTTTAGGCATGTTTAACATCCA |
| | | | GCACTGTAAGAAGCTGTCCAGCTGGGTGCTGCTGATGAAATACCTGGGCAATGCCACCGCCATCTTCTTCCTGCCTG |
| | | | ATGAGGGGAAACTACAGCACCTGGAAAATGAACTCACCCACGATATCATCACCAAGTTCCTGGAAAATGAAGACAG |
| | | | AAGGTCTGCCAGCTTACATTTACCCAAACTGTCCATTACTGGAACCTATGATCTGAAGAGCGTCCTGGGTCAACTGG |
| | | | GCATCACTAAGGTCTTCAGCAATGGGGCTGACCTCTCCGGGGTCACAGAGGAGGCACCCCTGAAGCTCTCCAAGGC |
| | | | CGTGCATAAGGCTGTGCTGACCATCGACGAGAAAGGGACTGAAGCTGCTGGGGCCATGTTTTTAGAGGCCATACCC |
| | | | ATGTCTATCCCCCCCGAGGTCAAGTTCAACAAACCCTTTGTCTTCTTAATGATTGAACAAAATACCAAGTCTCCCCTCT |
| | | | TCATGGGAAAAGTGGTGAATCCCACCCAAAAAtaa |
| 7 | Full | SEQ ID NO: | TTGGCCACTCCCTCTCTGCGCGCTCGCTCGCTCACTGAGGCCGGGCGACCAAAGGTCGCCCGACGCCCGGGCTTTGC |
| | Sequence | 770 | CCGGGCGGCCTCAGTGAGCGAGCGAGCGCGCAGAGAGGGAGTGGCCAACTCCATCACTAGGGGTTCCTAGATCTA |
| | | | CTAGTtaggtcagtgaagagaagaacaaaaagcagcatattacagttagttgtcttcatcaatctttaaatatgttgtgtggtttttctctccctgtttcca |
| | | | cagttGAGGACCCCCAGGGAGATGCAGCCCAGAAGACAGACACCAGCCACCATGACCAGGACCACCCCACCTTCAAC |
| | | | AAGATCACCCCCAACCTGGCAGAGTTTGCCTTCAGCCTGTACAGGCAGCTGGCCCACCAGAGCAACAGCACCAACAT |
| | | | CTTCTTCAGCCCAGTGAGCATAGCCACAGCCTTTGCCATGCTGAGCCTGGGCACCAAGGCAGACACCCATGATGAGA |
| | | | TCCTGGAGGGCCTGAACTTCAACCTGACAGAGATCCCAGAGGCCCAGATCCATGAGGGCTTCCAGGAGCTGCTGAG |
| | | | GACCCTGAACCAGCCAGACAGCCAGCTGCAGCTGACCACAGGCAATGGCCTGTTCCTGTCTGAGGGCCTGAAGCTG |
| | | | GTGGACAAGTTCCTGGAGGATGTGAAGAAGCTGTACCACTCTGAGGCCTTCACAGTGAACTTTGGAGACACAGAGG |
| | | | AGGCCAAGAAGCAGATCAATGACTATGTGGAGAAGGGCACCCAGGGCAAGATAGTGGACCTGGTGAAGGAGCTG |
| | | | GACAGGGACACAGTGTTTGCCCTGGTGAACTACATCTTCTTCAAGGGCAAGTGGGAGAGGCCCTTTGAGGTGAAGG |
| | | | ACACAGAGGAGGAGGACTTCCATGTGGACCAGGTGACCACAGTGAAGGTGCCCATGATGAAGAGGCTGGGCATGT |
| | | | TCAATATCCAGCACTGCAAGAAGCTGAGCAGCTGGGTGCTGCTGATGAAGTACCTGGGCAATGCCACAGCCATCTTC |
| | | | TTCCTGCCAGATGAGGGCAAGCTGCAGCACCTGGAGAATGAGCTGACCCATGACATCATCACCAAGTTCCTGGAGA |
| | | | ATGAGGACAGGAGGTCTGCCAGCCTGCACCTGCCCAAGCTGAGCATCACAGGCACCTATGACCTGAAGTCTGTGCT |
| | | | GGGCCAGCTGGGCATCACCAAGGTGTTCAGCAATGGAGCAGACCTGTCTGGAGTGACAGAGGAGGCCCCCCTGAA |
| | | | GCTGAGCAAGGCAGTGCACAAGGCAGTGCTGACCATAGATGAGAAGGGCACAGAGGCAGCAGGAGCCATGTTCCT |
| | | | GGAGGCCATCCCCATGAGCATCCCCCCAGAGGTGAAGTTCAACAAGCCTTTTGTGTTCCTGATGATAGAGCAGAACA |
| | | | CCAAGAGCCCCCTGTTCATGGGCAAGGTGGTGAACCCCACCCAGAAGTAACAGACATGATAAGATACATTGATGAG |
| | | | TTTGGACAAACCACAACTAGAATGCAGTGAAAAAAATGCTTTATTTGTGAAATTTGTGATGCTATTGCTTTATTTGTA |
| | | | ACCATTATAAGCTGCAATAAACAAGTTAACAACAACAATTGCATTCATTTTATGTTTCAGGTTCAGGGGGAGGTGTG |
| | | | GGAGGTTTTTTggggataccccctagagccccagctggttcttttctcctcagaagCCATAGAGCCCATCTCATCCCCAGCATGCCTGC |
| | | | TATTGTCTTCCCAATCCTCCCCCTTGCTGTCCTGCCCCACCCCACCCCCCAGAATAGAATGACACCTACTCAGACAATT |
| | | | CTATGCAATTTCCTCATTTTATTAGGAAAGGACAGTGGGAGTGGCACCTTCCAGGGTCAAGGAAGGCATGGGGGAG |
| | | | GGGCAAACAACAGATGGCTGGCAACTAGAAGGCACAGTCTaggttaTTTTTGGGTGGGATTCACCACTTTTCCCATGA |
| | | | AGAGGGGTGATTTAGTGTTCTGCTCTATCATGAGAAATACAAAAGGTTTGTTGAACTTGACCTCTGGGGGGATAGA |
| | | | CATGGGTATGGCCTCTAAAAACATGGCCCCAGCAGCCTCTGTGCCCTTCTCATCTATGGTCAGCACAGCCTTATGCAC |
| | | | TGCCTTGGAGAGCTTCAGGGGTGCCTCCTCTGTGACCCCAGAGAGGTCAGCCCCATTGCTGAAGACCTTAGTGATGC |
| | | | CCAGTTGACCCAGGACAGACTTCAGATCATAGGTTCCAGTAATGGACAGTTTGGGTAAATGTAAGCTGGCAGACCTT |
| | | | CTGTCTTCATTTTCCAGGAACTTGGTGATGATATCATGGGTGAGTTCATTTTCCAGGTGCTGTAGTTTCCCCTCATCAG |
| | | | GCAGGAAGAAGATGGCTGTGGCATTGCCCAGGTATTTCATCAGCAGCACCCAGCTGGACAGCTTCTTACAGTGCTG |
| | | | GATATTGAACATACCAAGCCTTTTCATCATAGGCACCTTCACTGTGGTCACCTGGTCCACATGGAAGTCCTCTTCCTCT |
| | | | GTGTCCTTGACTTCAAAGGGTCTCTCCCATTTGCCTTTAAAGAAGATGTAATTCACCAGAGCAAAAACTGTGTCTCTG |
| | | | TCAAGCTCCTTGACCAAATCCACAATTTTCCCTTGAGTACCCTTCTCCACATAATCATTGATCTGTTTCTTGGCCTCTTC |
| | | | TGTGTCCCCAAAGTTGACAGTGAAGGCTTCTGAGTGGTACAACTTTTTAACATCCTCCAAAAACTTATCCACTAGCTT |
| | | | CAGGCCCTCAGAGAGGAACAGGCCATTGCCTGTGGTCAGCTGGAGCTGGCTGTCTGGCTGGTTGAGGGTTCTGAG |
| | | | GAGTTCCTGGAAGCCTTCATGGATCTGAGCCTCTGGAATCTCTGTGAGGTTGAAATTCAGGCCCTCCAGGATTTCAT |
| | | | CATGAGTGTCAGCCTTGGTCCCCAGGGAGAGCATTGCAAAGGCTGTAGCTATGCTCACTGGGGAGAAGAAGATATT |
| | | | GGTGCTGTTGGACTGGTGTGCCAGCTGTCTGTATAGGCTGAAGGCAAACTCAGCCAGGTTGGGGGTGATCTTGTTG |
| | | | AAGGTTGGGTGATCCTGATCATGGTGGGATGTATCTGTCTTCTGGGCAGCATCTCCCTGGGGATCCTCaactgtggaaa |
| | | | cagggagagaaaaaccacacaacatatttaaagattgatgaagacaactaactgtaatatgctgctttttgttcttctcttcactgacctaAGAGATCT |
| | | | AGGAACCCCTAGTGATGGAGTTGGCCACTCCCTCTCTGCGCGCTCGCTCGCTCACTGAGGCCGCCCGGGCAAAGCCC |
| | | | GGGCGTCGGGCGACCTTTGGTCGCCCGGCCTCAGTGAGCGAGCGAGCGCGCAGAGAGGGAGTGGCCAAacgcgtggt |
| | | | gtaatcatggtcatagctgtttcctgtgtgaaattgttatccgctcacaattccacacaacatacgagccggaagcataaagtgtaaagcctggggtgcct |
| | | | aatgagtgagctaactcacattaattgcgttgcgctcactgcccgctttccagtcgggaaacctgtcgtgccagctgcattaatgaatcggccaacgcgcg |
| | | | gggagaggcggtttgcgtattgggcgctcttccgcttcctcgctcactgactcgctgcgctcggtcgttcggctgcggcgagcggtatcagctcactcaaa |
| | | | ggcggtaatacggttatccacagaatcaggggataacgcaggaaagaacatgtgagcaaaaggccagcaaaaggccaggaaccgtaaaaaggccgc |
| | | | gttgctggcgtttttccataggctccgcccccctgacgagcatcacaaaaatcgacgctcaagtcagaggtggcgaaacccgacaggactataaagata |
| | | | ccaggcgtttccccctggaagctccctcgtgcgctctcctgttccgaccctgccgcttaccggatacctgtccgcctttctcccttcgggaagcgtggcgctt |
| | | | tctcatagctcacgctgtaggtatctcagttcggtgtaggtcgttcgctccaagctgggctgtgtgcacgaaccccccgttcagcccgaccgctgcgcctta |
| | | | tccggtaactatcgtcttgagtccaacccggtaagacacgacttatcgccactggcagcagccactggtaacaggattagcagagcgaggtatgtaggc |
| | | | ggtgctacagagttcttgaagtggtggcctaactacggctacactagaagaacagtatttggtatctgcgctctgctgaagccagttaccttcggaaaaa |
| | | | gagttggtagctcttgatccggcaaacaaaccaccgctggtagcggtggtttttttgtttgcaagcagcagattacgcgcagaaaaaaaggatctcaaga |
| | | | agatcctttgatcttttctacggggtctgacgctcagtggaacgaaaactcacgttaagggattttggtcatgagattatcaaaaaggatcttcacctagat |
| | | | ccttttaaattaaaaatgaagttttaaatcaagcccaatctgaataatgttacaaccaattaaccaattctgattagaaaaactcatcgagcatcaaatga |
| | | | aactgcaatttattcatatcaggattatcaataccatatttttgaaaaagccgtttctgtaatgaaggagaaaactcaccgaggcagttccataggatggc |
| | | | aagatcctggtatcggtctgcgattccgactcgtccaacatcaatacaacctattaatttcccctcgtcaaaaataaggttatcaagtgagaaatcaccat |
| | | | gagtgacgactgaatccggtgagaatggcaaaagtttatgcatttctttccagacttgttcaacaggccagccattacgctcgtcatcaaaatcactcgca |
| | | | tcaaccaaaccgttattcattcgtgattgcgcctgagcgagacgaaatacgcgatcgctgttaaaaggacaattacaaacaggaatcgaatgcaaccgg |
| | | | cgcaggaacactgccagcgcatcaacaatattttcacctgaatcaggatattcttctaatacctggaatgctgtttttccggggatcgcagtggtgagtaa |
| | | | ccatgcatcatcaggagtacggataaaatgcttgatggtcggaagaggcataaattccgtcagccagtttagtctgaccatctcatctgtaacatcattgg |
| | | | caacgctacctttgccatgtttcagaaacaactctggcgcatcgggcttcccatacaagcgatagattgtcgcacctgattgcccgacattatcgcgagcc |
| | | | catttatacccatataaatcagcatccatgttggaatttaatcgcggcctcgacgtttcccgttgaatatggctcataacaccccttgtattactgtttatgta |
| | | | agcagacagttttattgttcatgatgatatatttttatcttgtgcaatgtaacatcagagattttgagacacgggccagagctgcatcgcgcgtttcggtgat |
| | | | gacggtgaaaacctctgacacatgcagctcccggagacggtcacagcttgtctgtaagcggatgccgggagcagacaagcccgtcagggcgcgtcagc |
| | | | gggtgttggcgggtgtcggggctggcttaactatgcggcatcagagcagattgtactgagagtgcaccatatgcggtgtgaaataccgcacagatgcgt |
| | | | aaggagaaaataccgcatcaggcgccattcgccattcaggctgcgcaactgttgggaagggcgatcggtgcgggcctcttcgctattacgccagctggc |
| | | | gaaagggggatgtgctgcaaggcgattaagttgggtaacgccagggttttcccagtcacgacgttgtaaaacgacggccagagaattc |
| | SERPINA1 | A1AT w/o | GAGGACCCCCAGGGAGATGCAGCCCAGAAGACAGACACCAGCCACCATGACCAGGACCACCCCACCTTCAACAAGA |
| | copy 1 | SP | TCACCCCCAACCTGGCAGAGTTTGCCTTCAGCCTGTACAGGCAGCTGGCCCACCAGAGCAACAGCACCAACATCTTC |
| | | (alternate | TTCAGCCCAGTGAGCATAGCCACAGCCTTTGCCATGCTGAGCCTGGGCACCAAGGCAGACACCCATGATGAGATCCT |
| | | codon usage | GGAGGGCCTGAACTTCAACCTGACAGAGATCCCAGAGGCCCAGATCCATGAGGGCTTCCAGGAGCTGCTGAGGAC |
| | | 1) CpG | CCTGAACCAGCCAGACAGCCAGCTGCAGCTGACCACAGGCAATGGCCTGTTCCTGTCTGAGGGCCTGAAGCTGGTG |
| | | depleted | GACAAGTTCCTGGAGGATGTGAAGAAGCTGTACCACTCTGAGGCCTTCACAGTGAACTTTGGAGACACAGAGGAGG |
| | | (SEQ ID NO: | CCAAGAAGCAGATCAATGACTATGTGGAGAAGGGCACCCAGGGCAAGATAGTGGACCTGGTGAAGGAGCTGGAC |
| | | 771) | AGGGACACAGTGTTTGCCCTGGTGAACTACATCTTCTTCAAGGGCAAGTGGGAGAGGCCCTTTGAGGTGAAGGACA |
| | | | CAGAGGAGGAGGACTTCCATGTGGACCAGGTGACCACAGTGAAGGTGCCCATGATGAAGAGGCTGGGCATGTTCA |
| | | | ATATCCAGCACTGCAAGAAGCTGAGCAGCTGGGTGCTGCTGATGAAGTACCTGGGCAATGCCACAGCCATCTTCTTC |
| | | | CTGCCAGATGAGGGCAAGCTGCAGCACCTGGAGAATGAGCTGACCCATGACATCATCACCAAGTTCCTGGAGAATG |
| | | | AGGACAGGAGGTCTGCCAGCCTGCACCTGCCCAAGCTGAGCATCACAGGCACCTATGACCTGAAGTCTGTGCTGGG |
| | | | CCAGCTGGGCATCACCAAGGTGTTCAGCAATGGAGCAGACCTGTCTGGAGTGACAGAGGAGGCCCCCCTGAAGCT |
| | | | GAGCAAGGCAGTGCACAAGGCAGTGCTGACCATAGATGAGAAGGGCACAGAGGCAGCAGGAGCCATGTTCCTGG |
| | | | AGGCCATCCCCATGAGCATCCCCCCAGAGGTGAAGTTCAACAAGCCTTTTGTGTTCCTGATGATAGAGCAGAACACC |
| | | | AAGAGCCCCCTGTTCATGGGCAAGGTGGTGAACCCCACCCAGAAGTAA |
| | SERPINA1 | A1AT w/o | GAGGATCCCCAGGGAGATGCTGCCCAGAAGACAGATACATCCCACCATGATCAGGATCACCCAACCTTCAACAAGA |
| | copy 2 (rev | SP CpG | TCACCCCCAACCTGGCTGAGTTTGCCTTCAGCCTATACAGACAGCTGGCACACCAGTCCAACAGCACCAATATCTTCT |
| | comp) | depleted | TCTCCCCAGTGAGCATAGCTACAGCCTTTGCAATGCTCTCCCTGGGGACCAAGGCTGACACTCATGATGAAATCCTG |
| | | (SEQ ID NO: | GAGGGCCTGAATTTCAACCTCACAGAGATTCCAGAGGCTCAGATCCATGAAGGCTTCCAGGAACTCCTCAGAACCCT |
| | | 772) | CAACCAGCCAGACAGCCAGCTCCAGCTGACCACAGGCAATGGCCTGTTCCTCTCTGAGGGCCTGAAGCTAGTGGAT |
| | | | AAGTTTTTGGAGGATGTTAAAAAGTTGTACCACTCAGAAGCCTTCACTGTCAACTTTGGGGACACAGAAGAGGCCAA |
| | | | GAAACAGATCAATGATTATGTGGAGAAGGGTACTCAAGGGAAAATTGTGGATTTGGTCAAGGAGCTTGACAGAGA |
| | | | CACAGTTTTTGCTCTGGTGAATTACATCTTCTTTAAAGGCAAATGGGAGAGACCCTTTGAAGTCAAGGACACAGAGG |
| | | | AAGAGGACTTCCATGTGGACCAGGTGACCACAGTGAAGGTGCCTATGATGAAAAGGCTTGGTATGTTCAATATCCA |
| | | | GCACTGTAAGAAGCTGTCCAGCTGGGTGCTGCTGATGAAATACCTGGGCAATGCCACAGCCATCTTCTTCCTGCCTG |
| | | | ATGAGGGGAAACTACAGCACCTGGAAAATGAACTCACCCATGATATCATCACCAAGTTCCTGGAAAATGAAGACAG |
| | | | AAGGTCTGCCAGCTTACATTTACCCAAACTGTCCATTACTGGAACCTATGATCTGAAGTCTGTCCTGGGTCAACTGGG |
| | | | CATCACTAAGGTCTTCAGCAATGGGGCTGACCTCTCTGGGGTCACAGAGGAGGCACCCCTGAAGCTCTCCAAGGCA |
| | | | GTGCATAAGGCTGTGCTGACCATAGATGAGAAGGGCACAGAGGCTGCTGGGGCCATGTTTTTAGAGGCCATACCCA |
| | | | TGTCTATCCCCCCAGAGGTCAAGTTCAACAAACCTTTTGTATTTCTCATGATAGAGCAGAACACTAAATCACCCCTCTT |
| | | | CATGGGAAAAGTGGTGAATCCCACCCAAAAAtaa |
| 8 | Full | (SEQ ID NO: | tgtaacatcagagattttgagacacgggccagagctgcatcgcgcgtttcggtgatgacggtgaaaacctctgacacatgcagctcccggagacggtca |
| | Sequence | 780) | cagcttgtctgtaagcggatgccgggagcagacaagcccgtcagggcgcgtcagcgggtgttggcgggtgtcggggctggcttaactatgcggcatcag |
| | | | agcagattgtactgagagtgcaccatatgcggtgtgaaataccgcacagatgcgtaaggagaaaataccgcatcaggcgccattcgccattcaggctgc |
| | | | gcaactgttgggaagggcgatcggtgcgggcctcttcgctattacgccagctggcgaaagggggatgtgctgcaaggcgattaagttgggtaacgccag |
| | | | ggttttcccagtcacgacgttgtaaaacgacggccagagaattcTTGGCCACTCCCTCTCTGCGCGCTCGCTCGCTCACTGAGGCCG |
| | | | GGCGACCAAAGGTCGCCCGACGCCCGGGCTTTGCCCGGGCGGCCTCAGTGAGCGAGCGAGCGCGCAGAGAGGGA |
| | | | GTGGCCAACTCCATCACTAGGGGTTCCTAGATCTACTAGTtaggtcagtgaagagaagaacaaaaagcagcatattacagttagttgt |
| | | | cttcatcaatctttaaatatgttgtgtggtttttctctccctgtttccacagttGAGGACCCCCAGGGAGATGCTGCCCAGAAGACAGACA |
| | | | CATCTCACCATGACCAGGACCACCCCACCTTCAACAAGATCACTCCCAATCTTGCAGAGTTTGCATTCTCTCTCTACAG |
| | | | ACAGCTTGCACACCAGAGCAACTCTACTAACATCTTCTTCTCTCCAGTCAGCATAGCAACAGCATTTGCAATGCTCAG |
| | | | CCTTGGCACAAAGGCAGACACACATGATGAGATCCTTGAGGGCCTCAACTTCAATCTCACAGAGATCCCAGAAGCCC |
| | | | AGATCCATGAGGGCTTCCAGGAGCTGCTGAGAACACTCAACCAGCCTGACTCTCAGCTCCAGCTCACAACAGGCAAT |
| | | | GGGCTCTTCCTCTCTGAGGGCCTCAAGCTTGTAGACAAGTTCCTGGAGGATGTCAAGAAGCTCTACCACTCTGAAGC |
| | | | CTTCACAGTCAACTTTGGAGACACAGAGGAAGCCAAGAAGCAGATCAATGACTATGTAGAGAAGGGGACTCAGGG |
| | | | CAAGATAGTAGACCTTGTCAAGGAGCTGGACAGAGACACAGTCTTTGCACTGGTCAACTACATCTTCTTCAAGGGGA |
| | | | AGTGGGAGAGACCCTTTGAAGTCAAGGACACAGAGGAGGAGGACTTCCATGTAGACCAGGTGACAACAGTCAAGG |
| | | | TTCCCATGATGAAGAGACTTGGCATGTTCAATATCCAGCACTGCAAGAAGCTCAGCTCTTGGGTCCTCCTCATGAAGT |
| | | | ACCTTGGCAATGCAACAGCAATCTTCTTCCTTCCTGATGAGGGCAAGCTCCAGCACCTTGAGAATGAGCTGACACAT |
| | | | GACATCATCACAAAGTTCCTGGAGAATGAGGACAGAAGGTCTGCATCTCTCCACCTTCCAAAGCTCAGCATCACAGG |
| | | | CACCTATGACCTCAAGTCTGTCCTTGGCCAGCTTGGCATCACAAAGGTCTTCTCTAATGGTGCAGACCTCTCTGGAGT |
| | | | CACAGAGGAAGCCCCCCTCAAGCTCAGCAAGGCTGTGCACAAGGCTGTGCTCACAATAGATGAGAAGGGGACAGA |
| | | | GGCTGCAGGTGCCATGTTCCTGGAAGCCATCCCCATGAGCATCCCACCAGAAGTCAAGTTCAACAAGCCTTTTGTCTT |
| | | | CCTGATGATAGAGCAGAACACAAAGTCTCCCCTCTTCATGGGCAAGGTAGTCAACCCCACTCAAAAGTAACAGACAT |
| | | | GATAAGATACATTGATGAGTTTGGACAAACCACAACTAGAATGCAGTGAAAAAAATGCTTTATTTGTGAAATTTGTG |
| | | | ATGCTATTGCTTTATTTGTAACCATTATAAGCTGCAATAAACAAGTTAACAACAACAATTGCATTCATTTTATGTTTCA |
| | | | GGTTCAGGGGGAGGTGTGGGAGGTTTTTTggggataccccctagagccccagctggttcttttctcctcagaagCCATAGAGCCCAT |
| | | | CTCATCCCCAGCATGCCTGCTATTGTCTTCCCAATCCTCCCCCTTGCTGTCCTGCCCCACCCCACCCCCCAGAATAGAA |
| | | | TGACACCTACTCAGACAATTCTATGCAATTTCCTCATTTTATTAGGAAAGGACAGTGGGAGTGGCACCTTCCAGGGTC |
| | | | AAGGAAGGCATGGGGGAGGGGCAAACAACAGATGGCTGGCAACTAGAAGGCACAGTCTaggTTACTTCTGGGTGG |
| | | | GGTTCACCACCTTGCCCATGAACAGGGGGCTCTTGGTGTTCTGCTCTATCATCAGGAACACAAAAGGCTTGTTGAAC |
| | | | TTCACCTCTGGGGGGATGCTCATGGGGATGGCCTCCAGGAACATGGCTCCTGCTGCCTCTGTGCCCTTCTCATCTATG |
| | | | GTCAGCACTGCCTTGTGCACTGCCTTGCTCAGCTTCAGGGGGGCCTCCTCTGTCACTCCAGACAGGTCTGCTCCATTG |
| | | | CTGAACACCTTGGTGATGCCCAGCTGGCCCAGCACAGACTTCAGGTCATAGGTGCCTGTGATGCTCAGCTTGGGCA |
| | | | GGTGCAGGCTGGCAGACCTCCTGTCCTCATTCTCCAGGAACTTGGTGATGATGTCATGGGTCAGCTCATTCTCCAGG |
| | | | TGCTGCAGCTTGCCCTCATCTGGCAGGAAGAAGATGGCTGTGGCATTGCCCAGGTACTTCATCAGCAGCACCCAGCT |
| | | | GCTCAGCTTCTTGCAGTGCTGGATATTGAACATGCCCAGCCTCTTCATCATGGGCACCTTCACTGTGGTCACCTGGTC |
| | | | CACATGGAAGTCCTCCTCCTCTGTGTCCTTCACCTCAAAGGGCCTCTCCCACTTGCCCTTGAAGAAGATGTAGTTCAC |
| | | | CAGGGCAAACACTGTGTCCCTGTCCAGCTCCTTCACCAGGTCCACTATCTTGCCCTGGGTGCCCTTCTCCACATAGTC |
| | | | ATTGATCTGCTTCTTGGCCTCCTCTGTGTCTCCAAAGTTCACTGTGAAGGCCTCAGAGTGGTACAGCTTCTTCACATCC |
| | | | TCCAGGAACTTGTCCACCAGCTTCAGGCCCTCAGACAGGAACAGGCCATTGCCTGTGGTCAGCTGCAGCTGGCTGTC |
| | | | TGGCTGGTTCAGGGTCCTCAGCAGCTCCTGGAAGCCCTCATGGATCTGGGCCTCTGGGATCTCTGTCAGGTTGAAGT |
| | | | TCAGGCCCTCCAGGATCTCATCATGGGTGTCTGCCTTGGTGCCCAGGCTCAGCATGGCAAAGGCTGTGGCTATGCTC |
| | | | ACTGGGCTGAAGAAGATGTTGGTGCTGTTGCTCTGGTGGGCCAGCTGCCTGTACAGGCTGAAGGCAAACTCTGCCA |
| | | | GGTTGGGGGTGATCTTGTTGAAGGTGGGGTGGTCCTGGTCATGGTGGCTGGTGTCTGTCTTCTGGGCTGCATCTCC |
| | | | CTGGGGGTCCTCaactgtggaaacagggagagaaaaaccacacaacatatttaaagattgatgaagacaactaactgtaatatgctgctttttgtt |
| | | | cttctcttcactgacctaACTAGTAGATCTAGGAACCCCTAGTGATGGAGTTGGCCACTCCCTCTCTGCGCGCTCGCTCGCTC |
| | | | ACTGAGGCCGCCCGGGCAAAGCCCGGGCGTCGGGCGACCTTTGGTCGCCCGGCCTCAGTGAGCGAGCGAGCGCGC |
| | | | AGAGAGGGAGTGGCCAAacgcgtggtgtaatcatggtcatagctgtttcctgtgtgaaattgttatccgctcacaattccacacaacatacgagc |
| | | | cggaagcataaagtgtaaagcctggggtgcctaatgagtgagctaactcacattaattgcgttgcgctcactgcccgctttccagtcgggaaacctgtcgt |
| | | | gccagctgcattaatgaatcggccaacgcgcggggagaggcggtttgcgtattgggcgctcttccgcttcctcgctcactgactcgctgcgctcggtcgttc |
| | | | ggctgcggcgagcggtatcagctcactcaaaggcggtaatacggttatccacagaatcaggggataacgcaggaaagaacatgtgagcaaaaggcca |
| | | | gcaaaaggccaggaaccgtaaaaaggccgcgttgctggcgtttttccataggctccgcccccctgacgagcatcacaaaaatcgacgctcaagtcaga |
| | | | ggtggcgaaacccgacaggactataaagataccaggcgtttccccctggaagctccctcgtgcgctctcctgttccgaccctgccgcttaccggatacctg |
| | | | tccgcctttctcccttcgggaagcgtggcgctttctcatagctcacgctgtaggtatctcagttcggtgtaggtcgttcgctccaagctgggctgtgtgcacg |
| | | | aaccccccgttcagcccgaccgctgcgccttatccggtaactatcgtcttgagtccaacccggtaagacacgacttatcgccactggcagcagccactggt |
| | | | aacaggattagcagagcgaggtatgtaggcggtgctacagagttcttgaagtggtggcctaactacggctacactagaagaacagtatttggtatctgc |
| | | | gctctgctgaagccagttaccttcggaaaaagagttggtagctcttgatccggcaaacaaaccaccgctggtagcggtggtttttttgtttgcaagcagca |
| | | | gattacgcgcagaaaaaaaggatctcaagaagatcctttgatcttttctacggggtctgacgctcagtggaacgaaaactcacgttaagggattttggtc |
| | | | atgagattatcaaaaaggatcttcacctagatccttttaaattaaaaatgaagttttaaatcaagcccaatctgaataatgttacaaccaattaaccaatt |
| | | | ctgattagaaaaactcatcgagcatcaaatgaaactgcaatttattcatatcaggattatcaataccatatttttgaaaaagccgtttctgtaatgaagga |
| | | | gaaaactcaccgaggcagttccataggatggcaagatcctggtatcggtctgcgattccgactcgtccaacatcaatacaacctattaatttcccctcgtc |
| | | | aaaaataaggttatcaagtgagaaatcaccatgagtgacgactgaatccggtgagaatggcaaaagtttatgcatttctttccagacttgttcaacaggc |
| | | | cagccattacgctcgtcatcaaaatcactcgcatcaaccaaaccgttattcattcgtgattgcgcctgagcgagacgaaatacgcgatcgctgttaaaag |
| | | | gacaattacaaacaggaatcgaatgcaaccggcgcaggaacactgccagcgcatcaacaatattttcacctgaatcaggatattcttctaatacctgga |
| | | | atgctgtttttccggggatcgcagtggtgagtaaccatgcatcatcaggagtacggataaaatgcttgatggtcggaagaggcataaattccgtcagcca |
| | | | gtttagtctgaccatctcatctgtaacatcattggcaacgctacctttgccatgtttcagaaacaactctggcgcatcgggcttcccatacaagcgatagat |
| | | | tgtcgcacctgattgcccgacattatcgcgagcccatttatacccatataaatcagcatccatgttggaatttaatcgcggcctcgacgtttcccgttgaat |
| | | | atggctcataacaccccttgtattactgtttatgtaagcagacagttttattgttcatgatgatatatttttatcttgtgcaa |
| | SERPINA1 | A1AT w/o | GAGGACCCCCAGGGAGATGCTGCCCAGAAGACAGACACATCTCACCATGACCAGGACCACCCCACCTTCAACAAGA |
| | copy 1 | SP | TCACTCCCAATCTTGCAGAGTTTGCATTCTCTCTCTACAGACAGCTTGCACACCAGAGCAACTCTACTAACATCTTCTT |
| | | (alternate | CTCTCCAGTCAGCATAGCAACAGCATTTGCAATGCTCAGCCTTGGCACAAAGGCAGACACACATGATGAGATCCTTG |
| | | codon usage | AGGGCCTCAACTTCAATCTCACAGAGATCCCAGAAGCCCAGATCCATGAGGGCTTCCAGGAGCTGCTGAGAACACT |
| | | 2) CpG | CAACCAGCCTGACTCTCAGCTCCAGCTCACAACAGGCAATGGGCTCTTCCTCTCTGAGGGCCTCAAGCTTGTAGACA |
| | | depleted | AGTTCCTGGAGGATGTCAAGAAGCTCTACCACTCTGAAGCCTTCACAGTCAACTTTGGAGACACAGAGGAAGCCAA |
| | | (SEQ ID NO: | GAAGCAGATCAATGACTATGTAGAGAAGGGGACTCAGGGCAAGATAGTAGACCTTGTCAAGGAGCTGGACAGAGA |
| | | 781) | CACAGTCTTTGCACTGGTCAACTACATCTTCTTCAAGGGGAAGTGGGAGAGACCCTTTGAAGTCAAGGACACAGAG |
| | | | GAGGAGGACTTCCATGTAGACCAGGTGACAACAGTCAAGGTTCCCATGATGAAGAGACTTGGCATGTTCAATATCC |
| | | | AGCACTGCAAGAAGCTCAGCTCTTGGGTCCTCCTCATGAAGTACCTTGGCAATGCAACAGCAATCTTCTTCCTTCCTG |
| | | | ATGAGGGCAAGCTCCAGCACCTTGAGAATGAGCTGACACATGACATCATCACAAAGTTCCTGGAGAATGAGGACAG |
| | | | AAGGTCTGCATCTCTCCACCTTCCAAAGCTCAGCATCACAGGCACCTATGACCTCAAGTCTGTCCTTGGCCAGCTTGG |
| | | | CATCACAAAGGTCTTCTCTAATGGTGCAGACCTCTCTGGAGTCACAGAGGAAGCCCCCCTCAAGCTCAGCAAGGCTG |
| | | | TGCACAAGGCTGTGCTCACAATAGATGAGAAGGGGACAGAGGCTGCAGGTGCCATGTTCCTGGAAGCCATCCCCAT |
| | | | GAGCATCCCACCAGAAGTCAAGTTCAACAAGCCTTTTGTCTTCCTGATGATAGAGCAGAACACAAAGTCTCCCCTCTT |
| | | | CATGGGCAAGGTAGTCAACCCCACTCAAAAG |
| | SERPINA1 | A1AT w/o | GAGGACCCCCAGGGAGATGCAGCCCAGAAGACAGACACCAGCCACCATGACCAGGACCACCCCACCTTCAACAAGA |
| | copy 2 (rev | SP CpG | TCACCCCCAACCTGGCAGAGTTTGCCTTCAGCCTGTACAGGCAGCTGGCCCACCAGAGCAACAGCACCAACATCTTC |
| | comp) | depleted | TTCAGCCCAGTGAGCATAGCCACAGCCTTTGCCATGCTGAGCCTGGGCACCAAGGCAGACACCCATGATGAGATCCT |
| | | (SEQ ID NO: | GGAGGGCCTGAACTTCAACCTGACAGAGATCCCAGAGGCCCAGATCCATGAGGGCTTCCAGGAGCTGCTGAGGAC |
| | | 782) | CCTGAACCAGCCAGACAGCCAGCTGCAGCTGACCACAGGCAATGGCCTGTTCCTGTCTGAGGGCCTGAAGCTGGTG |
| | | | GACAAGTTCCTGGAGGATGTGAAGAAGCTGTACCACTCTGAGGCCTTCACAGTGAACTTTGGAGACACAGAGGAGG |
| | | | CCAAGAAGCAGATCAATGACTATGTGGAGAAGGGCACCCAGGGCAAGATAGTGGACCTGGTGAAGGAGCTGGAC |
| | | | AGGGACACAGTGTTTGCCCTGGTGAACTACATCTTCTTCAAGGGCAAGTGGGAGAGGCCCTTTGAGGTGAAGGACA |
| | | | CAGAGGAGGAGGACTTCCATGTGGACCAGGTGACCACAGTGAAGGTGCCCATGATGAAGAGGCTGGGCATGTTCA |
| | | | ATATCCAGCACTGCAAGAAGCTGAGCAGCTGGGTGCTGCTGATGAAGTACCTGGGCAATGCCACAGCCATCTTCTTC |
| | | | CTGCCAGATGAGGGCAAGCTGCAGCACCTGGAGAATGAGCTGACCCATGACATCATCACCAAGTTCCTGGAGAATG |
| | | | AGGACAGGAGGTCTGCCAGCCTGCACCTGCCCAAGCTGAGCATCACAGGCACCTATGACCTGAAGTCTGTGCTGGG |
| | | | CCAGCTGGGCATCACCAAGGTGTTCAGCAATGGAGCAGACCTGTCTGGAGTGACAGAGGAGGCCCCCCTGAAGCT |
| | | | GAGCAAGGCAGTGCACAAGGCAGTGCTGACCATAGATGAGAAGGGCACAGAGGCAGCAGGAGCCATGTTCCTGG |
| | | | AGGCCATCCCCATGAGCATCCCCCCAGAGGTGAAGTTCAACAAGCCTTTTGTGTTCCTGATGATAGAGCAGAACACC |
| | | | AAGAGCCCCCTGTTCATGGGCAAGGTGGTGAACCCCACCCAGAAGTAA |
| 2 | Full | (SEQ ID NO: | TTGGCCACTCCCTCTCTGCGCGCTCGCTCGCTCACTGAGGCCGGGCGACCAAAGGTCGCCCGACGCCCGGGCTTTGC |
| | Sequence | 720) | CCGGGCGGCCTCAGTGAGCGAGCGAGCGCGCAGAGAGGGAGTGGCCAACTCCATCACTAGGGGTTCCTAGATCTA |
| | | | CTAGTtaggtcagtgaagagaagaacaaaaagcagcatattacagttagttgtcttcatcaatctttaaatatgttgtgtggtttttctctccctgtttcca |
| | | | cagttGAGGACCCCCAGGGCGACGCCGCCCAGAAGACCGACACCAGCCACCACGACCAGGACCACCCCACCTTCAAC |
| | | | AAGATCACCCCCAACCTGGCCGAGTTCGCCTTCAGCCTGTACAGGCAGCTGGCCCACCAGAGCAACAGCACCAACAT |
| | | | CTTCTTCAGCCCCGTGAGCATCGCCACCGCCTTCGCCATGCTGAGCCTGGGCACCAAGGCCGACACCCACGACGAGA |
| | | | TCCTGGAGGGCCTGAACTTCAACCTGACCGAGATCCCCGAGGCCCAGATCCACGAGGGCTTCCAGGAGCTGCTGAG |
| | | | GACCCTGAACCAGCCCGACAGCCAGCTGCAGCTGACCACCGGCAACGGCCTGTTCCTGAGCGAGGGCCTGAAGCTG |
| | | | GTGGACAAGTTCCTGGAGGACGTGAAGAAGCTGTACCACAGCGAGGCCTTCACCGTGAACTTCGGCGACACCGAG |
| | | | GAGGCCAAGAAGCAGATCAACGACTACGTGGAGAAGGGCACCCAGGGCAAGATCGTGGACCTGGTGAAGGAGCT |
| | | | GGACAGGGACACCGTGTTCGCCCTGGTGAACTACATCTTCTTCAAGGGCAAGTGGGAGAGGCCCTTCGAGGTGAAG |
| | | | GACACCGAGGAGGAGGACTTCCACGTGGACCAGGTGACCACCGTGAAGGTGCCCATGATGAAGAGGCTGGGCATG |
| | | | TTCAACATCCAGCACTGCAAGAAGCTGAGCAGCTGGGTGCTGCTGATGAAGTACCTGGGCAACGCCACCGCCATCTT |
| | | | CTTCCTGCCCGACGAGGGCAAGCTGCAGCACCTGGAGAACGAGCTGACCCACGACATCATCACCAAGTTCCTGGAG |
| | | | AACGAGGACAGGAGGAGCGCCAGCCTGCACCTGCCCAAGCTGAGCATCACCGGCACCTACGACCTGAAGAGCGTG |
| | | | CTGGGCCAGCTGGGCATCACCAAGGTGTTCAGCAACGGCGCCGACCTGAGCGGCGTGACCGAGGAGGCCCCCCTG |
| | | | AAGCTGAGCAAGGCCGTGCACAAGGCCGTGCTGACCATCGACGAGAAGGGCACCGAGGCCGCCGGCGCCATGTTC |
| | | | CTGGAGGCCATCCCCATGAGCATCCCCCCCGAGGTGAAGTTCAACAAGCCTTTCGTGTTCCTGATGATCGAGCAGAA |
| | | | CACCAAGAGCCCCCTGTTCATGGGCAAGGTGGTGAACCCCACCCAGAAGTAACAGACATGATAAGATACATTGATG |
| | | | AGTTTGGACAAACCACAACTAGAATGCAGTGAAAAAAATGCTTTATTTGTGAAATTTGTGATGCTATTGCTTTATTTG |
| | | | TAACCATTATAAGCTGCAATAAACAAGTTAACAACAACAATTGCATTCATTTTATGTTTCAGGTTCAGGGGGAGGTGT |
| | | | GGGAGGTTTTTTggggataccccctagagccccagctggttctttccgcctcagaagCCATAGAGCCCACCGCATCCCCAGCATGCCT |
| | | | GCTATTGTCTTCCCAATCCTCCCCCTTGCTGTCCTGCCCCACCCCACCCCCCAGAATAGAATGACACCTACTCAGACAA |
| | | | TGCGATGCAATTTCCTCATTTTATTAGGAAAGGACAGTGGGAGTGGCACCTTCCAGGGTCAAGGAAGGCACGGGGG |
| | | | AGGGGCAAACAACAGATGGCTGGCAACTAGAAGGCACAGTCGaggttaTTTTTGGGGGGATTCACCACTTTTCCCAT |
| | | | GAAGAGGGGTGATTTAGTGTTCTGCTCGATCATGAGAAATACAAAAGGTTTGTTGAACTTGACCTCGGGGGGGATA |
| | | | GACATGGGTATGGCCTCTAAAAACATGGCCCCAGCAGCCTCGGTGCCCTTCTCGTCGATGGTCAGCACAGCCTTATG |
| | | | CACGGCCTTGGAGAGCTTCAGGGGTGCCTCCTCTGTGACCCCGGAGAGGTCAGCCCCATTGCTGAAGACCTTAGTG |
| | | | ATGCCCAGTTGACCCAGGACGCTCTTCAGATCATAGGTTCCAGTAATGGACAGTTTGGGTAAATGTAAGCTGGCAGA |
| | | | CCTTCTGTCTTCATTTTCCAGGAACTTGGTGATGATATCGTGGGTGAGTTCATTTTCCAGGTGCTGTAGTTTCCCCTCA |
| | | | TCAGGCAGGAAGAAGATGGCGGTGGCATTGCCCAGGTATTTCATCAGCAGCACCCAGCTGGACAGCTTCTTACAGT |
| | | | GCTGGATATTGAACATACCAAGCCTTTTCATCATAGGCACCTTCACGGTGGTCACCTGGTCCACGTGGAAGTCCTCTT |
| | | | CCTCGGTGTCCTTGACTTCAAAGGGTCTCTCCCATTTGCCTTTAAAGAAGATGTAATTCACCAGAGCAAAAACTGTGT |
| | | | CTCTGTCAAGCTCCTTGACCAAATCCACAATTTTCCCTTGAGTACCCTTCTCCACGTAATCGTTGATCTGTTTCTTGGCC |
| | | | TCTTCGGTGTCCCCGAAGTTGACAGTGAAGGCTTCTGAGTGGTACAACTTTTTAACATCCTCCAAAAACTTATCCACT |
| | | | AGCTTCAGGCCCTCGCTGAGGAACAGGCCATTGCCGGTGGTCAGCTGGAGCTGGCTGTCTGGCTGGTTGAGGGTAC |
| | | | GGAGGAGTTCCTGGAAGCCTTCATGGATCTGAGCCTCCGGAATCTCCGTGAGGTTGAAATTCAGGCCCTCCAGGATT |
| | | | TCATCGTGAGTGTCAGCCTTGGTCCCCAGGGAGAGCATTGCAAAGGCTGTAGCGATGCTCACTGGGGAGAAGAAG |
| | | | ATATTGGTGCTGTTGGACTGGTGTGCCAGCTGGCGGTATAGGCTGAAGGCGAACTCAGCCAGGTTGGGGGTGATCT |
| | | | TGTTGAAGGTTGGGTGATCCTGATCATGGTGGGATGTATCTGTCTTCTGGGCAGCATCTCCCTGGGGATCCTCaactgt |
| | | | ggaaacagggagagaaaaaccacacaacatatttaaagattgatgaagacaactaactgtaatatgctgctttttgttcttctcttcactgacctaACTA |
| | | | GTAGATCTAGGAACCCCTAGTGATGGAGTTGGCCACTCCCTCTCTGCGCGCTCGCTCGCTCACTGAGGCCGCCCGGG |
| | | | CAAAGCCCGGGCGTCGGGCGACCTTTGGTCGCCCGGCCTCAGTGAGCGAGCGAGCGCGCAGAGAGGGAGTGGCC |
| | | | AAacgcgtggtgtaatcatggtcatagctgtttcctgtgtgaaattgttatccgctcacaattccacacaacatacgagccggaagcataaagtgtaaag |
| | | | cctggggtgcctaatgagtgagctaactcacattaattgcgttgcgctcactgcccgctttccagtcgggaaacctgtcgtgccagctgcattaatgaatcg |
| | | | gccaacgcgcggggagaggcggtttgcgtattgggcgctcttccgcttcctcgctcactgactcgctgcgctcggtcgttcggctgcggcgagcggtatca |
| | | | gctcactcaaaggcggtaatacggttatccacagaatcaggggataacgcaggaaagaacatgtgagcaaaaggccagcaaaaggccaggaaccgt |
| | | | aaaaaggccgcgttgctggcgtttttccataggctccgcccccctgacgagcatcacaaaaatcgacgctcaagtcagaggtggcgaaacccgacagg |
| | | | actataaagataccaggcgtttccccctggaagctccctcgtgcgctctcctgttccgaccctgccgcttaccggatacctgtccgcctttctcccttcggga |
| | | | agcgtggcgctttctcatagctcacgctgtaggtatctcagttcggtgtaggtcgttcgctccaagctgggctgtgtgcacgaaccccccgttcagcccgac |
| | | | cgctgcgccttatccggtaactatcgtcttgagtccaacccggtaagacacgacttatcgccactggcagcagccactggtaacaggattagcagagcga |
| | | | ggtatgtaggcggtgctacagagttcttgaagtggtggcctaactacggctacactagaagaacagtatttggtatctgcgctctgctgaagccagttacc |
| | | | ttcggaaaaagagttggtagctcttgatccggcaaacaaaccaccgctggtagcggtggtttttttgtttgcaagcagcagattacgcgcagaaaaaaag |
| | | | gatctcaagaagatcctttgatcttttctacggggtctgacgctcagtggaacgaaaactcacgttaagggattttggtcatgagattatcaaaaaggatc |
| | | | ttcacctagatccttttaaattaaaaatgaagttttaaatcaagcccaatctgaataatgttacaaccaattaaccaattctgattagaaaaactcatcga |
| | | | gcatcaaatgaaactgcaatttattcatatcaggattatcaataccatatttttgaaaaagccgtttctgtaatgaaggagaaaactcaccgaggcagttc |
| | | | cataggatggcaagatcctggtatcggtctgcgattccgactcgtccaacatcaatacaacctattaatttcccctcgtcaaaaataaggttatcaagtga |
| | | | gaaatcaccatgagtgacgactgaatccggtgagaatggcaaaagtttatgcatttctttccagacttgttcaacaggccagccattacgctcgtcatcaa |
| | | | aatcactcgcatcaaccaaaccgttattcattcgtgattgcgcctgagcgagacgaaatacgcgatcgctgttaaaaggacaattacaaacaggaatcg |
| | | | aatgcaaccggcgcaggaacactgccagcgcatcaacaatattttcacctgaatcaggatattcttctaatacctggaatgctgtttttccggggatcgca |
| | | | gtggtgagtaaccatgcatcatcaggagtacggataaaatgcttgatggtcggaagaggcataaattccgtcagccagtttagtctgaccatctcatctgt |
| | | | aacatcattggcaacgctacctttgccatgtttcagaaacaactctggcgcatcgggcttcccatacaagcgatagattgtcgcacctgattgcccgacat |
| | | | tatcgcgagcccatttatacccatataaatcagcatccatgttggaatttaatcgcggcctcgacgtttcccgttgaatatggctcataacaccccttgtatt |
| | | | actgtttatgtaagcagacagttttattgttcatgatgatatatttttatcttgtgcaatgtaacatcagagattttgagacacgggccagagctgcatcgcg |
| | | | cgtttcggtgatgacggtgaaaacctctgacacatgcagctcccggagacggtcacagcttgtctgtaagcggatgccgggagcagacaagcccgtcag |
| | | | ggcgcgtcagcgggtgttggcgggtgtcggggctggcttaactatgcggcatcagagcagattgtactgagagtgcaccatatgcggtgtgaaataccg |
| | | | cacagatgcgtaaggagaaaataccgcatcaggcgccattcgccattcaggctgcgcaactgttgggaagggcgatcggtgcgggcctcttcgctatta |
| | | | cgccagctggcgaaagggggatgtgctgcaaggcgattaagttgggtaacgccagggttttcccagtcacgacgttgtaaaacgacggccagagaattc |
| | SERPINA1 | A1AT w/o | GAGGACCCCCAGGGCGACGCCGCCCAGAAGACCGACACCAGCCACCACGACCAGGACCACCCCACCTTCAACAAGA |
| | copy 1 | SP | TCACCCCCAACCTGGCCGAGTTCGCCTTCAGCCTGTACAGGCAGCTGGCCCACCAGAGCAACAGCACCAACATCTTC |
| | | (alternate | TTCAGCCCCGTGAGCATCGCCACCGCCTTCGCCATGCTGAGCCTGGGCACCAAGGCCGACACCCACGACGAGATCCT |
| | | codon usage | GGAGGGCCTGAACTTCAACCTGACCGAGATCCCCGAGGCCCAGATCCACGAGGGCTTCCAGGAGCTGCTGAGGACC |
| | | 1) | CTGAACCAGCCCGACAGCCAGCTGCAGCTGACCACCGGCAACGGCCTGTTCCTGAGCGAGGGCCTGAAGCTGGTGG |
| | | (SEQ ID NO: | ACAAGTTCCTGGAGGACGTGAAGAAGCTGTACCACAGCGAGGCCTTCACCGTGAACTTCGGCGACACCGAGGAGG |
| | | 721) | CCAAGAAGCAGATCAACGACTACGTGGAGAAGGGCACCCAGGGCAAGATCGTGGACCTGGTGAAGGAGCTGGAC |
| | | | AGGGACACCGTGTTCGCCCTGGTGAACTACATCTTCTTCAAGGGCAAGTGGGAGAGGCCCTTCGAGGTGAAGGACA |
| | | | CCGAGGAGGAGGACTTCCACGTGGACCAGGTGACCACCGTGAAGGTGCCCATGATGAAGAGGCTGGGCATGTTCA |
| | | | ACATCCAGCACTGCAAGAAGCTGAGCAGCTGGGTGCTGCTGATGAAGTACCTGGGCAACGCCACCGCCATCTTCTTC |
| | | | CTGCCCGACGAGGGCAAGCTGCAGCACCTGGAGAACGAGCTGACCCACGACATCATCACCAAGTTCCTGGAGAACG |
| | | | AGGACAGGAGGAGCGCCAGCCTGCACCTGCCCAAGCTGAGCATCACCGGCACCTACGACCTGAAGAGCGTGCTGG |
| | | | GCCAGCTGGGCATCACCAAGGTGTTCAGCAACGGCGCCGACCTGAGCGGCGTGACCGAGGAGGCCCCCCTGAAGC |
| | | | TGAGCAAGGCCGTGCACAAGGCCGTGCTGACCATCGACGAGAAGGGCACCGAGGCCGCCGGCGCCATGTTCCTGG |
| | | | AGGCCATCCCCATGAGCATCCCCCCCGAGGTGAAGTTCAACAAGCCTTTCGTGTTCCTGATGATCGAGCAGAACACC |
| | | | AAGAGCCCCCTGTTCATGGGCAAGGTGGTGAACCCCACCCAGAAGTAA |
| | SERPINA1 | A1AT w/o | GAGGATCCCCAGGGAGATGCTGCCCAGAAGACAGATACATCCCACCATGATCAGGATCACCCAACCTTCAACAAGA |
| | copy 2 (rev | SP | TCACCCCCAACCTGGCTGAGTTCGCCTTCAGCCTATACCGCCAGCTGGCACACCAGTCCAACAGCACCAATATCTTCT |
| | comp) | (SEQ ID NO: | TCTCCCCAGTGAGCATCGCTACAGCCTTTGCAATGCTCTCCCTGGGGACCAAGGCTGACACTCACGATGAAATCCTG |
| | | 722) | GAGGGCCTGAATTTCAACCTCACGGAGATTCCGGAGGCTCAGATCCATGAAGGCTTCCAGGAACTCCTCCGTACCCT |
| | | | CAACCAGCCAGACAGCCAGCTCCAGCTGACCACCGGCAATGGCCTGTTCCTCAGCGAGGGCCTGAAGCTAGTGGAT |
| | | | AAGTTTTTGGAGGATGTTAAAAAGTTGTACCACTCAGAAGCCTTCACTGTCAACTTCGGGGACACCGAAGAGGCCAA |
| | | | GAAACAGATCAACGATTACGTGGAGAAGGGTACTCAAGGGAAAATTGTGGATTTGGTCAAGGAGCTTGACAGAGA |
| | | | CACAGTTTTTGCTCTGGTGAATTACATCTTCTTTAAAGGCAAATGGGAGAGACCCTTTGAAGTCAAGGACACCGAGG |
| | | | AAGAGGACTTCCACGTGGACCAGGTGACCACCGTGAAGGTGCCTATGATGAAAAGGCTTGGTATGTTCAATATCCA |
| | | | GCACTGTAAGAAGCTGTCCAGCTGGGTGCTGCTGATGAAATACCTGGGCAATGCCACCGCCATCTTCTTCCTGCCTG |
| | | | ATGAGGGGAAACTACAGCACCTGGAAAATGAACTCACCCACGATATCATCACCAAGTTCCTGGAAAATGAAGACAG |
| | | | AAGGTCTGCCAGCTTACATTTACCCAAACTGTCCATTACTGGAACCTATGATCTGAAGAGCGTCCTGGGTCAACTGG |
| | | | GCATCACTAAGGTCTTCAGCAATGGGGCTGACCTCTCCGGGGTCACAGAGGAGGCACCCCTGAAGCTCTCCAAGGC |
| | | | CGTGCATAAGGCTGTGCTGACCATCGACGAGAAGGGCACCGAGGCTGCTGGGGCCATGTTTTTAGAGGCCATACCC |
| | | | ATGTCTATCCCCCCCGAGGTCAAGTTCAACAAACCTTTTGTATTTCTCATGATCGAGCAGAACACTAAATCACCCCTCT |
| | | | TCATGGGAAAAGTGGTGAATCCCACCCAAAAAtaa |
| 3 | Full | (SEQ ID NO: | TTGGCCACTCCCTCTCTGCGCGCTCGCTCGCTCACTGAGGCCGGGCGACCAAAGGTCGCCCGACGCCCGGGCTTTGC |
| | Sequence | 730) | CCGGGCGGCCTCAGTGAGCGAGCGAGCGCGCAGAGAGGGAGTGGCCAACTCCATCACTAGGGGTTCCTAGATCTA |
| | | | CTAGTATAACTTCGTATAGCATACATTATACGAAGTTATATGTATGCtaggtcagtgaagagaagaacaaaaagcagcatattaca |
| | | | gttagttgtcttcatcaatctttaaatatgttgtgtggtttttctctccctgtttccacagttGAGGACCCCCAGGGCGACGCCGCCCAGAAGA |
| | | | CCGACACCAGCCACCACGACCAGGACCACCCCACCTTCAACAAGATCACCCCCAACCTGGCCGAGTTCGCCTTCAGC |
| | | | CTGTACAGGCAGCTGGCCCACCAGAGCAACAGCACCAACATCTTCTTCAGCCCCGTGAGCATCGCCACCGCCTTCGC |
| | | | CATGCTGAGCCTGGGCACCAAGGCCGACACCCACGACGAGATCCTGGAGGGCCTGAACTTCAACCTGACCGAGATC |
| | | | CCCGAGGCCCAGATCCACGAGGGCTTCCAGGAGCTGCTGAGGACCCTGAACCAGCCCGACAGCCAGCTGCAGCTGA |
| | | | CCACCGGCAACGGCCTGTTCCTGAGCGAGGGCCTGAAGCTGGTGGACAAGTTCCTGGAGGACGTGAAGAAGCTGT |
| | | | ACCACAGCGAGGCCTTCACCGTGAACTTCGGCGACACCGAGGAGGCCAAGAAGCAGATCAACGACTACGTGGAGA |
| | | | AGGGCACCCAGGGCAAGATCGTGGACCTGGTGAAGGAGCTGGACAGGGACACCGTGTTCGCCCTGGTGAACTACA |
| | | | TCTTCTTCAAGGGCAAGTGGGAGAGGCCCTTCGAGGTGAAGGACACCGAGGAGGAGGACTTCCACGTGGACCAGG |
| | | | TGACCACCGTGAAGGTGCCCATGATGAAGAGGCTGGGCATGTTCAACATCCAGCACTGCAAGAAGCTGAGCAGCTG |
| | | | GGTGCTGCTGATGAAGTACCTGGGCAACGCCACCGCCATCTTCTTCCTGCCCGACGAGGGCAAGCTGCAGCACCTG |
| | | | GAGAACGAGCTGACCCACGACATCATCACCAAGTTCCTGGAGAACGAGGACAGGAGGAGCGCCAGCCTGCACCTG |
| | | | CCCAAGCTGAGCATCACCGGCACCTACGACCTGAAGAGCGTGCTGGGCCAGCTGGGCATCACCAAGGTGTTCAGCA |
| | | | ACGGCGCCGACCTGAGCGGCGTGACCGAGGAGGCCCCCCTGAAGCTGAGCAAGGCCGTGCACAAGGCCGTGCTGA |
| | | | CCATCGACGAGAAGGGCACCGAGGCCGCCGGCGCCATGTTCCTGGAGGCCATCCCCATGAGCATCCCCCCCGAGGT |
| | | | GAAGTTCAACAAGCCTTTCGTGTTCCTGATGATCGAGCAGAACACCAAGAGCCCCCTGTTCATGGGCAAGGTGGTG |
| | | | AACCCCACCCAGAAGTAACAGACATGATAAGATACATTGATGAGTTTGGACAAACCACAACTAGAATGCAGTGAAA |
| | | | AAAATGCTTTATTTGTGAAATTTGTGATGCTATTGCTTTATTTGTAACCATTATAAGCTGCAATAAACAAGTTAACAAC |
| | | | AACAATTGCATTCATTTTATGTTTCAGGTTCAGGGGGAGGTGTGGGAGGTTTTTTggggataccccctagagccccagctggtt |
| | | | ctttccgcctcagaagCCATAGAGCCCACCGCATCCCCAGCATGCCTGCTATTGTCTTCCCAATCCTCCCCCTTGCTGTCCTG |
| | | | CCCCACCCCACCCCCCAGAATAGAATGACACCTACTCAGACAATGCGATGCAATTTCCTCATTTTATTAGGAAAGGAC |
| | | | AGTGGGAGTGGCACCTTCCAGGGTCAAGGAAGGCACGGGGGAGGGGCAAACAACAGATGGCTGGCAACTAGAAG |
| | | | GCACAGTCGaggttaTTTTTGGGTGGGATTCACCACTTTTCCCATGAAGAGGGGTGATTTAGTGTTCTGCTCGATCATG |
| | | | AGAAATACAAAAGGTTTGTTGAACTTGACCTCGGGGGGGATAGACATGGGTATGGCCTCTAAAAACATGGCCCCAG |
| | | | CAGCCTCGGTGCCCTTCTCGTCGATGGTCAGCACAGCCTTATGCACGGCCTTGGAGAGCTTCAGGGGTGCCTCCTCT |
| | | | GTGACCCCGGAGAGGTCAGCCCCATTGCTGAAGACCTTAGTGATGCCCAGTTGACCCAGGACGCTCTTCAGATCATA |
| | | | GGTTCCAGTAATGGACAGTTTGGGTAAATGTAAGCTGGCAGACCTTCTGTCTTCATTTTCCAGGAACTTGGTGATGA |
| | | | TATCGTGGGTGAGTTCATTTTCCAGGTGCTGTAGTTTCCCCTCATCAGGCAGGAAGAAGATGGCGGTGGCATTGCCC |
| | | | AGGTATTTCATCAGCAGCACCCAGCTGGACAGCTTCTTACAGTGCTGGATATTGAACATACCAAGCCTTTTCATCATA |
| | | | GGCACCTTCACGGTGGTCACCTGGTCCACGTGGAAGTCCTCTTCCTCGGTGTCCTTGACTTCAAAGGGTCTCTCCCAT |
| | | | TTGCCTTTAAAGAAGATGTAATTCACCAGAGCAAAAACTGTGTCTCTGTCAAGCTCCTTGACCAAATCCACAATTTTC |
| | | | CCTTGAGTACCCTTCTCCACGTAATCGTTGATCTGTTTCTTGGCCTCTTCGGTGTCCCCGAAGTTGACAGTGAAGGCTT |
| | | | CTGAGTGGTACAACTTTTTAACATCCTCCAAAAACTTATCCACTAGCTTCAGGCCCTCGCTGAGGAACAGGCCATTGC |
| | | | CGGTGGTCAGCTGGAGCTGGCTGTCTGGCTGGTTGAGGGTACGGAGGAGTTCCTGGAAGCCTTCATGGATCTGAGC |
| | | | CTCCGGAATCTCCGTGAGGTTGAAATTCAGGCCCTCCAGGATTTCATCGTGAGTGTCAGCCTTGGTCCCCAGGGAGA |
| | | | GCATTGCAAAGGCTGTAGCGATGCTCACTGGGGAGAAGAAGATATTGGTGCTGTTGGACTGGTGTGCCAGCTGGC |
| | | | GGTATAGGCTGAAGGCGAACTCAGCCAGGTTGGGGGTGATCTTGTTGAAGGTTGGGTGATCCTGATCATGGTGGG |
| | | | ATGTATCTGTCTTCTGGGCAGCATCTCCCTGGGGATCCTCaactgtggaaacagggagagaaaaaccacacaacatatttaaagatt |
| | | | gatgaagacaactaactgtaatatgctgctttttgttcttctcttcactgacctaATGTATGCATAACTTCGTATAGCATACATTATACGAA |
| | | | GTTATACTAGTAGATCTAGGAACCCCTAGTGATGGAGTTGGCCACTCCCTCTCTGCGCGCTCGCTCGCTCACTGAGG |
| | | | CCGCCCGGGCAAAGCCCGGGCGTCGGGCGACCTTTGGTCGCCCGGCCTCAGTGAGCGAGCGAGCGCGCAGAGAGG |
| | | | GAGTGGCCAAacgcgtggtgtaatcatggtcatagctgtttcctgtgtgaaattgttatccgctcacaattccacacaacatacgagccggaagcata |
| | | | aagtgtaaagcctggggtgcctaatgagtgagctaactcacattaattgcgttgcgctcactgcccgctttccagtcgggaaacctgtcgtgccagctgca |
| | | | ttaatgaatcggccaacgcgcggggagaggcggtttgcgtattgggcgctcttccgcttcctcgctcactgactcgctgcgctcggtcgttcggctgcggc |
| | | | gagcggtatcagctcactcaaaggcggtaatacggttatccacagaatcaggggataacgcaggaaagaacatgtgagcaaaaggccagcaaaagg |
| | | | ccaggaaccgtaaaaaggccgcgttgctggcgtttttccataggctccgcccccctgacgagcatcacaaaaatcgacgctcaagtcagaggtggcgaa |
| | | | acccgacaggactataaagataccaggcgtttccccctggaagctccctcgtgcgctctcctgttccgaccctgccgcttaccggatacctgtccgcctttc |
| | | | tcccttcgggaagcgtggcgctttctcatagctcacgctgtaggtatctcagttcggtgtaggtcgttcgctccaagctgggctgtgtgcacgaaccccccg |
| | | | ttcagcccgaccgctgcgccttatccggtaactatcgtcttgagtccaacccggtaagacacgacttatcgccactggcagcagccactggtaacaggatt |
| | | | agcagagcgaggtatgtaggcggtgctacagagttcttgaagtggtggcctaactacggctacactagaagaacagtatttggtatctgcgctctgctga |
| | | | agccagttaccttcggaaaaagagttggtagctcttgatccggcaaacaaaccaccgctggtagcggtggtttttttgtttgcaagcagcagattacgcgc |
| | | | agaaaaaaaggatctcaagaagatcctttgatcttttctacggggtctgacgctcagtggaacgaaaactcacgttaagggattttggtcatgagattatc |
| | | | aaaaaggatcttcacctagatccttttaaattaaaaatgaagttttaaatcaagcccaatctgaataatgttacaaccaattaaccaattctgattagaaa |
| | | | aactcatcgagcatcaaatgaaactgcaatttattcatatcaggattatcaataccatatttttgaaaaagccgtttctgtaatgaaggagaaaactcacc |
| | | | gaggcagttccataggatggcaagatcctggtatcggtctgcgattccgactcgtccaacatcaatacaacctattaatttcccctcgtcaaaaataaggt |
| | | | tatcaagtgagaaatcaccatgagtgacgactgaatccggtgagaatggcaaaagtttatgcatttctttccagacttgttcaacaggccagccattacg |
| | | | ctcgtcatcaaaatcactcgcatcaaccaaaccgttattcattcgtgattgcgcctgagcgagacgaaatacgcgatcgctgttaaaaggacaattacaa |
| | | | acaggaatcgaatgcaaccggcgcaggaacactgccagcgcatcaacaatattttcacctgaatcaggatattcttctaatacctggaatgctgtttttcc |
| | | | ggggatcgcagtggtgagtaaccatgcatcatcaggagtacggataaaatgcttgatggtcggaagaggcataaattccgtcagccagtttagtctgac |
| | | | catctcatctgtaacatcattggcaacgctacctttgccatgtttcagaaacaactctggcgcatcgggcttcccatacaagcgatagattgtcgcacctga |
| | | | ttgcccgacattatcgcgagcccatttatacccatataaatcagcatccatgttggaatttaatcgcggcctcgacgtttcccgttgaatatggctcataac |
| | | | accccttgtattactgtttatgtaagcagacagttttattgttcatgatgatatatttttatcttgtgcaatgtaacatcagagattttgagacacgggccaga |
| | | | gctgcatcgcgcgtttcggtgatgacggtgaaaacctctgacacatgcagctcccggagacggtcacagcttgtctgtaagcggatgccgggagcagac |
| | | | aagcccgtcagggcgcgtcagcgggtgttggcgggtgtcggggctggcttaactatgcggcatcagagcagattgtactgagagtgcaccatatgcggt |
| | | | gtgaaataccgcacagatgcgtaaggagaaaataccgcatcaggcgccattcgccattcaggctgcgcaactgttgggaagggcgatcggtgcgggcc |
| | | | tcttcgctattacgccagctggcgaaagggggatgtgctgcaaggcgattaagttgggtaacgccagggttttcccagtcacgacgttgtaaaacgacgg |
| | | | ccagagaattc |
| | SERPINA1 | A1AT w/o | GAGGACCCCCAGGGCGACGCCGCCCAGAAGACCGACACCAGCCACCACGACCAGGACCACCCCACCTTCAACAAGA |
| | copy 1 | SP | TCACCCCCAACCTGGCCGAGTTCGCCTTCAGCCTGTACAGGCAGCTGGCCCACCAGAGCAACAGCACCAACATCTTC |
| | | (alternate | TTCAGCCCCGTGAGCATCGCCACCGCCTTCGCCATGCTGAGCCTGGGCACCAAGGCCGACACCCACGACGAGATCCT |
| | | codon usage | GGAGGGCCTGAACTTCAACCTGACCGAGATCCCCGAGGCCCAGATCCACGAGGGCTTCCAGGAGCTGCTGAGGACC |
| | | 1) | CTGAACCAGCCCGACAGCCAGCTGCAGCTGACCACCGGCAACGGCCTGTTCCTGAGCGAGGGCCTGAAGCTGGTGG |
| | | (SEQ ID NO: | ACAAGTTCCTGGAGGACGTGAAGAAGCTGTACCACAGCGAGGCCTTCACCGTGAACTTCGGCGACACCGAGGAGG |
| | | 731) | CCAAGAAGCAGATCAACGACTACGTGGAGAAGGGCACCCAGGGCAAGATCGTGGACCTGGTGAAGGAGCTGGAC |
| | | | AGGGACACCGTGTTCGCCCTGGTGAACTACATCTTCTTCAAGGGCAAGTGGGAGAGGCCCTTCGAGGTGAAGGACA |
| | | | CCGAGGAGGAGGACTTCCACGTGGACCAGGTGACCACCGTGAAGGTGCCCATGATGAAGAGGCTGGGCATGTTCA |
| | | | ACATCCAGCACTGCAAGAAGCTGAGCAGCTGGGTGCTGCTGATGAAGTACCTGGGCAACGCCACCGCCATCTTCTTC |
| | | | CTGCCCGACGAGGGCAAGCTGCAGCACCTGGAGAACGAGCTGACCCACGACATCATCACCAAGTTCCTGGAGAACG |
| | | | AGGACAGGAGGAGCGCCAGCCTGCACCTGCCCAAGCTGAGCATCACCGGCACCTACGACCTGAAGAGCGTGCTGG |
| | | | GCCAGCTGGGCATCACCAAGGTGTTCAGCAACGGCGCCGACCTGAGCGGCGTGACCGAGGAGGCCCCCCTGAAGC |
| | | | TGAGCAAGGCCGTGCACAAGGCCGTGCTGACCATCGACGAGAAGGGCACCGAGGCCGCCGGCGCCATGTTCCTGG |
| | | | AGGCCATCCCCATGAGCATCCCCCCCGAGGTGAAGTTCAACAAGCCTTTCGTGTTCCTGATGATCGAGCAGAACACC |
| | | | AAGAGCCCCCTGTTCATGGGCAAGGTGGTGAACCCCACCCAGAAGTAA |
| | SERPINA1 | A1AT w/o | GAGGATCCCCAGGGAGATGCTGCCCAGAAGACAGATACATCCCACCATGATCAGGATCACCCAACCTTCAACAAGA |
| | copy 2 (rev | SP | TCACCCCCAACCTGGCTGAGTTCGCCTTCAGCCTATACCGCCAGCTGGCACACCAGTCCAACAGCACCAATATCTTCT |
| | comp) | (SEQ ID NO: | TCTCCCCAGTGAGCATCGCTACAGCCTTTGCAATGCTCTCCCTGGGGACCAAGGCTGACACTCACGATGAAATCCTG |
| | | 732) | GAGGGCCTGAATTTCAACCTCACGGAGATTCCGGAGGCTCAGATCCATGAAGGCTTCCAGGAACTCCTCCGTACCCT |
| | | | CAACCAGCCAGACAGCCAGCTCCAGCTGACCACCGGCAATGGCCTGTTCCTCAGCGAGGGCCTGAAGCTAGTGGAT |
| | | | AAGTTTTTGGAGGATGTTAAAAAGTTGTACCACTCAGAAGCCTTCACTGTCAACTTCGGGGACACCGAAGAGGCCAA |
| | | | GAAACAGATCAACGATTACGTGGAGAAGGGTACTCAAGGGAAAATTGTGGATTTGGTCAAGGAGCTTGACAGAGA |
| | | | CACAGTTTTTGCTCTGGTGAATTACATCTTCTTTAAAGGCAAATGGGAGAGACCCTTTGAAGTCAAGGACACCGAGG |
| | | | AAGAGGACTTCCACGTGGACCAGGTGACCACCGTGAAGGTGCCTATGATGAAAAGGCTTGGTATGTTCAATATCCA |
| | | | GCACTGTAAGAAGCTGTCCAGCTGGGTGCTGCTGATGAAATACCTGGGCAATGCCACCGCCATCTTCTTCCTGCCTG |
| | | | ATGAGGGGAAACTACAGCACCTGGAAAATGAACTCACCCACGATATCATCACCAAGTTCCTGGAAAATGAAGACAG |
| | | | AAGGTCTGCCAGCTTACATTTACCCAAACTGTCCATTACTGGAACCTATGATCTGAAGAGCGTCCTGGGTCAACTGG |
| | | | GCATCACTAAGGTCTTCAGCAATGGGGCTGACCTCTCCGGGGTCACAGAGGAGGCACCCCTGAAGCTCTCCAAGGC |
| | | | CGTGCATAAGGCTGTGCTGACCATCGACGAGAAGGGCACCGAGGCTGCTGGGGCCATGTTTTTAGAGGCCATACCC |
| | | | ATGTCTATCCCCCCCGAGGTCAAGTTCAACAAACCTTTTGTATTTCTCATGATCGAGCAGAACACTAAATCACCCCTCT |
| | | | TCATGGGAAAAGTGGTGAATCCCACCCAAAAAtaa |
| 4 | Full | (SEQ ID NO: | ctcaaaggcggtaatacggttatccacagaatcaggggataacgcaggaaagaacatgtgagcaaaaggccagcaaaaggccaggaaccgtaaaaa |
| | Sequence | 740) | ggccgcgttgctggcgtttttccataggctccgcccccctgacgagcatcacaaaaatcgacgctcaagtcagaggtggcgaaacccgacaggactata |
| | | | aagataccaggcgtttccccctggaagctccctcgtgcgctctcctgttccgaccctgccgcttaccggatacctgtccgcctttctcccttcgggaagcgtg |
| | | | gcgctttctcatagctcacgctgtaggtatctcagttcggtgtaggtcgttcgctccaagctgggctgtgtgcacgaaccccccgttcagcccgaccgctgc |
| | | | gccttatccggtaactatcgtcttgagtccaacccggtaagacacgacttatcgccactggcagcagccactggtaacaggattagcagagcgaggtatg |
| | | | taggcggtgctacagagttcttgaagtggtggcctaactacggctacactagaagaacagtatttggtatctgcgctctgctgaagccagttaccttcgga |
| | | | aaaagagttggtagctcttgatccggcaaacaaaccaccgctggtagcggtggtttttttgtttgcaagcagcagattacgcgcagaaaaaaaggatctc |
| | | | aagaagatcctttgatcttttctacggggtctgacgctcagtggaacgaaaactcacgttaagggattttggtcatgagattatcaaaaaggatcttcacc |
| | | | tagatccttttaaattaaaaatgaagttttaaatcaagcccaatctgaataatgttacaaccaattaaccaattctgattagaaaaactcatcgagcatca |
| | | | aatgaaactgcaatttattcatatcaggattatcaataccatatttttgaaaaagccgtttctgtaatgaaggagaaaactcaccgaggcagttccatagg |
| | | | atggcaagatcctggtatcggtctgcgattccgactcgtccaacatcaatacaacctattaatttcccctcgtcaaaaataaggttatcaagtgagaaatc |
| | | | accatgagtgacgactgaatccggtgagaatggcaaaagtttatgcatttctttccagacttgttcaacaggccagccattacgctcgtcatcaaaatcac |
| | | | tcgcatcaaccaaaccgttattcattcgtgattgcgcctgagcgagacgaaatacgcgatcgctgttaaaaggacaattacaaacaggaatcgaatgca |
| | | | accggcgcaggaacactgccagcgcatcaacaatattttcacctgaatcaggatattcttctaatacctggaatgctgtttttccggggatcgcagtggtg |
| | | | agtaaccatgcatcatcaggagtacggataaaatgcttgatggtcggaagaggcataaattccgtcagccagtttagtctgaccatctcatctgtaacat |
| | | | cattggcaacgctacctttgccatgtttcagaaacaactctggcgcatcgggcttcccatacaagcgatagattgtcgcacctgattgcccgacattatcgc |
| | | | gagcccatttatacccatataaatcagcatccatgttggaatttaatcgcggcctcgacgtttcccgttgaatatggctcataacaccccttgtattactgtt |
| | | | tatgtaagcagacagttttattgttcatgatgatatatttttatcttgtgcaatgtaacatcagagattttgagacacgggccagagctgcatcgcgcgtttc |
| | | | ggtgatgacggtgaaaacctctgacacatgcagctcccggagacggtcacagcttgtctgtaagcggatgccgggagcagacaagcccgtcagggcgc |
| | | | gtcagcgggtgttggcgggtgtcggggctggcttaactatgcggcatcagagcagattgtactgagagtgcaccatatgcggtgtgaaataccgcacag |
| | | | atgcgtaaggagaaaataccgcatcaggcgccattcgccattcaggctgcgcaactgttgggaagggcgatcggtgcgggcctcttcgctattacgcca |
| | | | gctggcgaaagggggatgtgctgcaaggcgattaagttgggtaacgccagggttttcccagtcacgacgttgtaaaacgacggccagagaattcTTGG |
| | | | CCACTCCCTCTCTGCGCGCTCGCTCGCTCACTGAGGCCGGGCGACCAAAGGTCGCCCGACGCCCGGGCTTTGCCCGG |
| | | | GCGGCCTCAGTGAGCGAGCGAGCGCGCAGAGAGGGAGTGGCCAACTCCATCACTAGGGGTTCCTAGATCTACTAG |
| | | | Ttaggtcagtgaagagaagaacaaaaagcagcatattacagttagttgtcttcatcaatctttaaatatgttgtgtggtttttctctccctgtttccacagtt |
| | | | GAGGACCCCCAGGGCGACGCTGCCCAGAAGACGGACACGTCGCACCACGACCAGGACCACCCCACCTTCAACAAGA |
| | | | TCACTCCCAATCTCGCGGAGTTCGCGTTCTCGCTCTACCGCCAGCTCGCGCACCAGAGCAACTCGACTAACATCTTCT |
| | | | TCTCGCCCGTCAGCATCGCGACGGCGTTCGCGATGCTCAGCCTCGGCACGAAGGCGGACACGCACGACGAGATCCT |
| | | | CGAGGGCCTCAACTTCAATCTCACAGAGATCCCAGAAGCCCAGATCCACGAGGGCTTCCAGGAGCTGCTGCGGACG |
| | | | CTCAACCAGCCTGACTCGCAGCTCCAGCTCACGACGGGCAATGGGCTCTTCCTCAGCGAGGGCCTCAAGCTCGTCGA |
| | | | CAAGTTCCTGGAGGACGTCAAGAAGCTCTACCACTCGGAAGCCTTCACGGTCAACTTCGGCGACACAGAGGAAGCC |
| | | | AAGAAGCAGATCAACGACTACGTCGAGAAGGGGACTCAGGGCAAGATCGTCGACCTCGTCAAGGAGCTGGACCGA |
| | | | GACACGGTCTTCGCACTGGTCAACTACATCTTCTTCAAGGGGAAGTGGGAGCGCCCCTTCGAAGTCAAGGACACAG |
| | | | AGGAGGAGGACTTCCACGTCGACCAGGTGACGACGGTCAAGGTTCCCATGATGAAGCGCCTCGGCATGTTCAACAT |
| | | | CCAGCACTGCAAGAAGCTCAGCTCGTGGGTCCTCCTCATGAAGTACCTCGGCAACGCGACGGCGATCTTCTTCCTTC |
| | | | CTGACGAGGGCAAGCTCCAGCACCTCGAGAACGAGCTGACGCACGACATCATCACGAAGTTCCTGGAGAACGAGG |
| | | | ACCGCCGATCGGCGTCGCTCCACCTTCCAAAGCTCAGCATCACGGGCACCTACGACCTCAAGTCGGTCCTCGGCCAG |
| | | | CTCGGCATCACGAAGGTCTTCTCGAATGGTGCCGACCTCAGCGGCGTCACAGAGGAAGCCCCCCTCAAGCTCAGCA |
| | | | AGGCTGTGCACAAGGCTGTGCTCACGATCGACGAGAAGGGGACAGAGGCTGCCGGTGCCATGTTCCTGGAAGCCA |
| | | | TCCCCATGAGCATCCCACCAGAAGTCAAGTTCAACAAGCCTTTCGTCTTCCTGATGATAGAGCAGAACACGAAGTCG |
| | | | CCCCTCTTCATGGGCAAGGTCGTCAACCCCACTCAAAAGTAACAGACATGATAAGATACATTGATGAGTTTGGACAA |
| | | | ACCACAACTAGAATGCAGTGAAAAAAATGCTTTATTTGTGAAATTTGTGATGCTATTGCTTTATTTGTAACCATTATA |
| | | | AGCTGCAATAAACAAGTTAACAACAACAATTGCATTCATTTTATGTTTCAGGTTCAGGGGGAGGTGTGGGAGGTTTT |
| | | | TTggggataccccctagagccccagctggttctttccgcctcagaagCCATAGAGCCCACCGCATCCCCAGCATGCCTGCTATTGTCT |
| | | | TCCCAATCCTCCCCCTTGCTGTCCTGCCCCACCCCACCCCCCAGAATAGAATGACACCTACTCAGACAATGCGATGCA |
| | | | ATTTCCTCATTTTATTAGGAAAGGACAGTGGGAGTGGCACCTTCCAGGGTCAAGGAAGGCACGGGGGAGGGGCAA |
| | | | ACAACAGATGGCTGGCAACTAGAAGGCACAGTCGaggTTACTTCTGGGTGGGGTTCACCACCTTGCCCATGAACAGG |
| | | | GGGCTCTTGGTGTTCTGCTCGATCATCAGGAACACGAAAGGCTTGTTGAACTTCACCTCGGGGGGGATGCTCATGG |
| | | | GGATGGCCTCCAGGAACATGGCGCCGGCGGCCTCGGTGCCCTTCTCGTCGATGGTCAGCACGGCCTTGTGCACGGC |
| | | | CTTGCTCAGCTTCAGGGGGGCCTCCTCGGTCACGCCGCTCAGGTCGGCGCCGTTGCTGAACACCTTGGTGATGCCCA |
| | | | GCTGGCCCAGCACGCTCTTCAGGTCGTAGGTGCCGGTGATGCTCAGCTTGGGCAGGTGCAGGCTGGCGCTCCTCCT |
| | | | GTCCTCGTTCTCCAGGAACTTGGTGATGATGTCGTGGGTCAGCTCGTTCTCCAGGTGCTGCAGCTTGCCCTCGTCGG |
| | | | GCAGGAAGAAGATGGCGGTGGCGTTGCCCAGGTACTTCATCAGCAGCACCCAGCTGCTCAGCTTCTTGCAGTGCTG |
| | | | GATATTGAACATGCCCAGCCTCTTCATCATGGGCACCTTCACGGTGGTCACCTGGTCCACGTGGAAGTCCTCCTCCTC |
| | | | GGTGTCCTTCACCTCGAAGGGCCTCTCCCACTTGCCCTTGAAGAAGATGTAGTTCACCAGGGCGAACACGGTGTCCC |
| | | | TGTCCAGCTCCTTCACCAGGTCCACGATCTTGCCCTGGGTGCCCTTCTCCACGTAGTCGTTGATCTGCTTCTTGGCCTC |
| | | | CTCGGTGTCGCCGAAGTTCACGGTGAAGGCCTCGCTGTGGTACAGCTTCTTCACGTCCTCCAGGAACTTGTCCACCA |
| | | | GCTTCAGGCCCTCGCTCAGGAACAGGCCGTTGCCGGTGGTCAGCTGCAGCTGGCTGTCGGGCTGGTTCAGGGTCCT |
| | | | CAGCAGCTCCTGGAAGCCCTCGTGGATCTGGGCCTCGGGGATCTCGGTCAGGTTGAAGTTCAGGCCCTCCAGGATC |
| | | | TCGTCGTGGGTGTCGGCCTTGGTGCCCAGGCTCAGCATGGCGAAGGCGGTGGCGATGCTCACGGGGCTGAAGAAG |
| | | | ATGTTGGTGCTGTTGCTCTGGTGGGCCAGCTGCCTGTACAGGCTGAAGGCGAACTCGGCCAGGTTGGGGGTGATCT |
| | | | TGTTGAAGGTGGGGTGGTCCTGGTCGTGGTGGCTGGTGTCGGTCTTCTGGGCGGCGTCGCCCTGGGGGTCCTCaact |
| | | | gtggaaacagggagagaaaaaccacacaacatatttaaagattgatgaagacaactaactgtaatatgctgctttttgttcttctcttcactgacctaAC |
| | | | TAGTAGATCTAGGAACCCCTAGTGATGGAGTTGGCCACTCCCTCTCTGCGCGCTCGCTCGCTCACTGAGGCCGCCCG |
| | | | GGCAAAGCCCGGGCGTCGGGCGACCTTTGGTCGCCCGGCCTCAGTGAGCGAGCGAGCGCGCAGAGAGGGAGTGG |
| | | | CCAAacgcgtggtgtaatcatggtcatagctgtttcctgtgtgaaattgttatccgctcacaattccacacaacatacgagccggaagcataaagtgtaa |
| | | | agcctggggtgcctaatgagtgagctaactcacattaattgcgttgcgctcactgcccgctttccagtcgggaaacctgtcgtgccagctgcattaatgaa |
| | | | tcggccaacgcgcggggagaggcggtttgcgtattgggcgctcttccgcttcctcgctcactgactcgctgcgctcggtcgttcggctgcggcgagcggta |
| | | | tcagctca |
| | SERPINA1 | A1AT w/o | GAGGACCCCCAGGGCGACGCTGCCCAGAAGACGGACACGTCGCACCACGACCAGGACCACCCCACCTTCAACAAGA |
| | copy 1 | SP | TCACTCCCAATCTCGCGGAGTTCGCGTTCTCGCTCTACCGCCAGCTCGCGCACCAGAGCAACTCGACTAACATCTTCT |
| | | (alternate | TCTCGCCCGTCAGCATCGCGACGGCGTTCGCGATGCTCAGCCTCGGCACGAAGGCGGACACGCACGACGAGATCCT |
| | | codon usage | CGAGGGCCTCAACTTCAATCTCACAGAGATCCCAGAAGCCCAGATCCACGAGGGCTTCCAGGAGCTGCTGCGGACG |
| | | 2) | CTCAACCAGCCTGACTCGCAGCTCCAGCTCACGACGGGCAATGGGCTCTTCCTCAGCGAGGGCCTCAAGCTCGTCGA |
| | | (SEQ ID NO: | CAAGTTCCTGGAGGACGTCAAGAAGCTCTACCACTCGGAAGCCTTCACGGTCAACTTCGGCGACACAGAGGAAGCC |
| | | 741) | AAGAAGCAGATCAACGACTACGTCGAGAAGGGGACTCAGGGCAAGATCGTCGACCTCGTCAAGGAGCTGGACCGA |
| | | | GACACGGTCTTCGCACTGGTCAACTACATCTTCTTCAAGGGGAAGTGGGAGCGCCCCTTCGAAGTCAAGGACACAG |
| | | | AGGAGGAGGACTTCCACGTCGACCAGGTGACGACGGTCAAGGTTCCCATGATGAAGCGCCTCGGCATGTTCAACAT |
| | | | CCAGCACTGCAAGAAGCTCAGCTCGTGGGTCCTCCTCATGAAGTACCTCGGCAACGCGACGGCGATCTTCTTCCTTC |
| | | | CTGACGAGGGCAAGCTCCAGCACCTCGAGAACGAGCTGACGCACGACATCATCACGAAGTTCCTGGAGAACGAGG |
| | | | ACCGCCGATCGGCGTCGCTCCACCTTCCAAAGCTCAGCATCACGGGCACCTACGACCTCAAGTCGGTCCTCGGCCAG |
| | | | CTCGGCATCACGAAGGTCTTCTCGAATGGTGCCGACCTCAGCGGCGTCACAGAGGAAGCCCCCCTCAAGCTCAGCA |
| | | | AGGCTGTGCACAAGGCTGTGCTCACGATCGACGAGAAGGGGACAGAGGCTGCCGGTGCCATGTTCCTGGAAGCCA |
| | | | TCCCCATGAGCATCCCACCAGAAGTCAAGTTCAACAAGCCTTTCGTCTTCCTGATGATAGAGCAGAACACGAAGTCG |
| | | | CCCCTCTTCATGGGCAAGGTCGTCAACCCCACTCAAAAG |
| | SERPINA1 | A1AT w/o | GAGGACCCCCAGGGCGACGCCGCCCAGAAGACCGACACCAGCCACCACGACCAGGACCACCCCACCTTCAACAAGA |
| | copy 2 (rev | SP | TCACCCCCAACCTGGCCGAGTTCGCCTTCAGCCTGTACAGGCAGCTGGCCCACCAGAGCAACAGCACCAACATCTTC |
| | comp) | (alternate | TTCAGCCCCGTGAGCATCGCCACCGCCTTCGCCATGCTGAGCCTGGGCACCAAGGCCGACACCCACGACGAGATCCT |
| | | codon usage | GGAGGGCCTGAACTTCAACCTGACCGAGATCCCCGAGGCCCAGATCCACGAGGGCTTCCAGGAGCTGCTGAGGACC |
| | | 1) | CTGAACCAGCCCGACAGCCAGCTGCAGCTGACCACCGGCAACGGCCTGTTCCTGAGCGAGGGCCTGAAGCTGGTGG |
| | | (SEQ ID NO: | ACAAGTTCCTGGAGGACGTGAAGAAGCTGTACCACAGCGAGGCCTTCACCGTGAACTTCGGCGACACCGAGGAGG |
| | | 742) | CCAAGAAGCAGATCAACGACTACGTGGAGAAGGGCACCCAGGGCAAGATCGTGGACCTGGTGAAGGAGCTGGAC |
| | | | AGGGACACCGTGTTCGCCCTGGTGAACTACATCTTCTTCAAGGGCAAGTGGGAGAGGCCCTTCGAGGTGAAGGACA |
| | | | CCGAGGAGGAGGACTTCCACGTGGACCAGGTGACCACCGTGAAGGTGCCCATGATGAAGAGGCTGGGCATGTTCA |
| | | | ATATCCAGCACTGCAAGAAGCTGAGCAGCTGGGTGCTGCTGATGAAGTACCTGGGCAACGCCACCGCCATCTTCTTC |
| | | | CTGCCCGACGAGGGCAAGCTGCAGCACCTGGAGAACGAGCTGACCCACGACATCATCACCAAGTTCCTGGAGAACG |
| | | | AGGACAGGAGGAGCGCCAGCCTGCACCTGCCCAAGCTGAGCATCACCGGCACCTACGACCTGAAGAGCGTGCTGG |
| | | | GCCAGCTGGGCATCACCAAGGTGTTCAGCAACGGCGCCGACCTGAGCGGCGTGACCGAGGAGGCCCCCCTGAAGC |
| | | | TGAGCAAGGCCGTGCACAAGGCCGTGCTGACCATCGACGAGAAGGGCACCGAGGCCGCCGGCGCCATGTTCCTGG |
| | | | AGGCCATCCCCATGAGCATCCCCCCCGAGGTGAAGTTCAACAAGCCTTTCGTGTTCCTGATGATCGAGCAGAACACC |
| | | | AAGAGCCCCCTGTTCATGGGCAAGGTGGTGAACCCCACCCAGAAGTAA |
| 5 | Full | (SEQ ID NO: | TTGGCCACTCCCTCTCTGCGCGCTCGCTCGCTCACTGAGGCCGGGCGACCAAAGGTCGCCCGACGCCCGGGCTTTGC |
| | Sequence | 750) | CCGGGCGGCCTCAGTGAGCGAGCGAGCGCGCAGAGAGGGAGTGGCCAACTCCATCACTAGGGGTTCCTAGATCTA |
| | | | CTAGTATAACTTCGTATAGCATACATTATACGAAGTTATATGTATGCtaggtcagtgaagagaagaacaaaaagcagcatattaca |
| | | | gttagttgtcttcatcaatctttaaatatgttgtgtggtttttctctccctgtttccacagttGAGGACCCCCAGGGCGACGCTGCCCAGAAGA |
| | | | CGGACACGTCGCACCACGACCAGGACCACCCCACCTTCAACAAGATCACTCCCAATCTCGCGGAGTTCGCGTTCTCG |
| | | | CTCTACCGCCAGCTCGCGCACCAGAGCAACTCGACTAACATCTTCTTCTCGCCCGTCAGCATCGCGACGGCGTTCGCG |
| | | | ATGCTCAGCCTCGGCACGAAGGCGGACACGCACGACGAGATCCTCGAGGGCCTCAACTTCAATCTCACAGAGATCC |
| | | | CAGAAGCCCAGATCCACGAGGGCTTCCAGGAGCTGCTGCGGACGCTCAACCAGCCTGACTCGCAGCTCCAGCTCAC |
| | | | GACGGGCAATGGGCTCTTCCTCAGCGAGGGCCTCAAGCTCGTCGACAAGTTCCTGGAGGACGTCAAGAAGCTCTAC |
| | | | CACTCGGAAGCCTTCACGGTCAACTTCGGCGACACAGAGGAAGCCAAGAAGCAGATCAACGACTACGTCGAGAAG |
| | | | GGGACTCAGGGCAAGATCGTCGACCTCGTCAAGGAGCTGGACCGAGACACGGTCTTCGCACTGGTCAACTACATCT |
| | | | TCTTCAAGGGGAAGTGGGAGCGCCCCTTCGAAGTCAAGGACACAGAGGAGGAGGACTTCCACGTCGACCAGGTGA |
| | | | CGACGGTCAAGGTTCCCATGATGAAGCGCCTCGGCATGTTCAACATCCAGCACTGCAAGAAGCTCAGCTCGTGGGT |
| | | | CCTCCTCATGAAGTACCTCGGCAACGCGACGGCGATCTTCTTCCTTCCTGACGAGGGCAAGCTCCAGCACCTCGAGA |
| | | | ACGAGCTGACGCACGACATCATCACGAAGTTCCTGGAGAACGAGGACCGCCGATCGGCGTCGCTCCACCTTCCAAA |
| | | | GCTCAGCATCACGGGCACCTACGACCTCAAGTCGGTCCTCGGCCAGCTCGGCATCACGAAGGTCTTCTCGAATGGTG |
| | | | CCGACCTCAGCGGCGTCACAGAGGAAGCCCCCCTCAAGCTCAGCAAGGCTGTGCACAAGGCTGTGCTCACGATCGA |
| | | | CGAGAAGGGGACAGAGGCTGCCGGTGCCATGTTCCTGGAAGCCATCCCCATGAGCATCCCACCAGAAGTCAAGTTC |
| | | | AACAAGCCTTTCGTCTTCCTGATGATAGAGCAGAACACGAAGTCGCCCCTCTTCATGGGCAAGGTCGTCAACCCCAC |
| | | | TCAAAAGTAACAGACATGATAAGATACATTGATGAGTTTGGACAAACCACAACTAGAATGCAGTGAAAAAAATGCT |
| | | | TTATTTGTGAAATTTGTGATGCTATTGCTTTATTTGTAACCATTATAAGCTGCAATAAACAAGTTAACAACAACAATTG |
| | | | CATTCATTTTATGTTTCAGGTTCAGGGGGAGGTGTGGGAGGTTTTTTggggataccccctagagccccagctggttctttccgcctc |
| | | | agaagCCATAGAGCCCACCGCATCCCCAGCATGCCTGCTATTGTCTTCCCAATCCTCCCCCTTGCTGTCCTGCCCCACCC |
| | | | CACCCCCCAGAATAGAATGACACCTACTCAGACAATGCGATGCAATTTCCTCATTTTATTAGGAAAGGACAGTGGGA |
| | | | GTGGCACCTTCCAGGGTCAAGGAAGGCACGGGGGAGGGGCAAACAACAGATGGCTGGCAACTAGAAGGCACAGT |
| | | | CGaggTTACTTCTGGGTGGGGTTCACCACCTTGCCCATGAACAGGGGGCTCTTGGTGTTCTGCTCGATCATCAGGAAC |
| | | | ACGAAAGGCTTGTTGAACTTCACCTCGGGGGGGATGCTCATGGGGATGGCCTCCAGGAACATGGCGCCGGCGGCC |
| | | | TCGGTGCCCTTCTCGTCGATGGTCAGCACGGCCTTGTGCACGGCCTTGCTCAGCTTCAGGGGGGCCTCCTCGGTCAC |
| | | | GCCGCTCAGGTCGGCGCCGTTGCTGAACACCTTGGTGATGCCCAGCTGGCCCAGCACGCTCTTCAGGTCGTAGGTG |
| | | | CCGGTGATGCTCAGCTTGGGCAGGTGCAGGCTGGCGCTCCTCCTGTCCTCGTTCTCCAGGAACTTGGTGATGATGTC |
| | | | GTGGGTCAGCTCGTTCTCCAGGTGCTGCAGCTTGCCCTCGTCGGGCAGGAAGAAGATGGCGGTGGCGTTGCCCAGG |
| | | | TACTTCATCAGCAGCACCCAGCTGCTCAGCTTCTTGCAGTGCTGGATATTGAACATGCCCAGCCTCTTCATCATGGGC |
| | | | ACCTTCACGGTGGTCACCTGGTCCACGTGGAAGTCCTCCTCCTCGGTGTCCTTCACCTCGAAGGGCCTCTCCCACTTG |
| | | | CCCTTGAAGAAGATGTAGTTCACCAGGGCGAACACGGTGTCCCTGTCCAGCTCCTTCACCAGGTCCACGATCTTGCC |
| | | | CTGGGTGCCCTTCTCCACGTAGTCGTTGATCTGCTTCTTGGCCTCCTCGGTGTCGCCGAAGTTCACGGTGAAGGCCTC |
| | | | GCTGTGGTACAGCTTCTTCACGTCCTCCAGGAACTTGTCCACCAGCTTCAGGCCCTCGCTCAGGAACAGGCCGTTGC |
| | | | CGGTGGTCAGCTGCAGCTGGCTGTCGGGCTGGTTCAGGGTCCTCAGCAGCTCCTGGAAGCCCTCGTGGATCTGGGC |
| | | | CTCGGGGATCTCGGTCAGGTTGAAGTTCAGGCCCTCCAGGATCTCGTCGTGGGTGTCGGCCTTGGTGCCCAGGCTC |
| | | | AGCATGGCGAAGGCGGTGGCGATGCTCACGGGGCTGAAGAAGATGTTGGTGCTGTTGCTCTGGTGGGCCAGCTGC |
| | | | CTGTACAGGCTGAAGGCGAACTCGGCCAGGTTGGGGGTGATCTTGTTGAAGGTGGGGTGGTCCTGGTCGTGGTGG |
| | | | CTGGTGTCGGTCTTCTGGGCGGCGTCGCCCTGGGGGTCCTCaactgtggaaacagggagagaaaaaccacacaacatatttaaag |
| | | | attgatgaagacaactaactgtaatatgctgctttttgttcttctcttcactgacctaATGTATGCATAACTTCGTATAGCATACATTATACG |
| | | | AAGTTATACTAGTAGATCTAGGAACCCCTAGTGATGGAGTTGGCCACTCCCTCTCTGCGCGCTCGCTCGCTCACTGA |
| | | | GGCCGCCCGGGCAAAGCCCGGGCGTCGGGCGACCTTTGGTCGCCCGGCCTCAGTGAGCGAGCGAGCGCGCAGAGA |
| | | | GGGAGTGGCCAAacgcgtggtgtaatcatggtcatagctgtttcctgtgtgaaattgttatccgctcacaattccacacaacatacgagccggaagc |
| | | | ataaagtgtaaagcctggggtgcctaatgagtgagctaactcacattaattgcgttgcgctcactgcccgctttccagtcgggaaacctgtcgtgccagct |
| | | | gcattaatgaatcggccaacgcgcggggagaggcggtttgcgtattgggcgctcttccgcttcctcgctcactgactcgctgcgctcggtcgttcggctgc |
| | | | ggcgagcggtatcagctcactcaaaggcggtaatacggttatccacagaatcaggggataacgcaggaaagaacatgtgagcaaaaggccagcaaa |
| | | | aggccaggaaccgtaaaaaggccgcgttgctggcgtttttccataggctccgcccccctgacgagcatcacaaaaatcgacgctcaagtcagaggtggc |
| | | | gaaacccgacaggactataaagataccaggcgtttccccctggaagctccctcgtgcgctctcctgttccgaccctgccgcttaccggatacctgtccgcc |
| | | | tttctcccttcgggaagcgtggcgctttctcatagctcacgctgtaggtatctcagttcggtgtaggtcgttcgctccaagctgggctgtgtgcacgaacccc |
| | | | ccgttcagcccgaccgctgcgccttatccggtaactatcgtcttgagtccaacccggtaagacacgacttatcgccactggcagcagccactggtaacag |
| | | | gattagcagagcgaggtatgtaggcggtgctacagagttcttgaagtggtggcctaactacggctacactagaagaacagtatttggtatctgcgctctg |
| | | | ctgaagccagttaccttcggaaaaagagttggtagctcttgatccggcaaacaaaccaccgctggtagcggtggtttttttgtttgcaagcagcagattac |
| | | | gcgcagaaaaaaaggatctcaagaagatcctttgatcttttctacggggtctgacgctcagtggaacgaaaactcacgttaagggattttggtcatgaga |
| | | | ttatcaaaaaggatcttcacctagatccttttaaattaaaaatgaagttttaaatcaagcccaatctgaataatgttacaaccaattaaccaattctgatta |
| | | | gaaaaactcatcgagcatcaaatgaaactgcaatttattcatatcaggattatcaataccatatttttgaaaaagccgtttctgtaatgaaggagaaaact |
| | | | caccgaggcagttccataggatggcaagatcctggtatcggtctgcgattccgactcgtccaacatcaatacaacctattaatttcccctcgtcaaaaata |
| | | | aggttatcaagtgagaaatcaccatgagtgacgactgaatccggtgagaatggcaaaagtttatgcatttctttccagacttgttcaacaggccagccatt |
| | | | acgctcgtcatcaaaatcactcgcatcaaccaaaccgttattcattcgtgattgcgcctgagcgagacgaaatacgcgatcgctgttaaaaggacaatta |
| | | | caaacaggaatcgaatgcaaccggcgcaggaacactgccagcgcatcaacaatattttcacctgaatcaggatattcttctaatacctggaatgctgttt |
| | | | ttccggggatcgcagtggtgagtaaccatgcatcatcaggagtacggataaaatgcttgatggtcggaagaggcataaattccgtcagccagtttagtct |
| | | | gaccatctcatctgtaacatcattggcaacgctacctttgccatgtttcagaaacaactctggcgcatcgggcttcccatacaagcgatagattgtcgcac |
| | | | ctgattgcccgacattatcgcgagcccatttatacccatataaatcagcatccatgttggaatttaatcgcggcctcgacgtttcccgttgaatatggctcat |
| | | | aacaccccttgtattactgtttatgtaagcagacagttttattgttcatgatgatatatttttatcttgtgcaatgtaacatcagagattttgagacacgggcc |
| | | | agagctgcatcgcgcgtttcggtgatgacggtgaaaacctctgacacatgcagctcccggagacggtcacagcttgtctgtaagcggatgccgggagca |
| | | | gacaagcccgtcagggcgcgtcagcgggtgttggcgggtgtcggggctggcttaactatgcggcatcagagcagattgtactgagagtgcaccatatgc |
| | | | ggtgtgaaataccgcacagatgcgtaaggagaaaataccgcatcaggcgccattcgccattcaggctgcgcaactgttgggaagggcgatcggtgcgg |
| | | | gcctcttcgctattacgccagctggcgaaagggggatgtgctgcaaggcgattaagttgggtaacgccagggttttcccagtcacgacgttgtaaaacga |
| | | | cggccagagaattc |
| | SERPINA1 | AAT w/o SP | GAGGACCCCCAGGGCGACGCTGCCCAGAAGACGGACACGTCGCACCACGACCAGGACCACCCCACCTTCAACAAGA |
| | copy 1 | (alternate | TCACTCCCAATCTCGCGGAGTTCGCGTTCTCGCTCTACCGCCAGCTCGCGCACCAGAGCAACTCGACTAACATCTTCT |
| | | codon usage | TCTCGCCCGTCAGCATCGCGACGGCGTTCGCGATGCTCAGCCTCGGCACGAAGGCGGACACGCACGACGAGATCCT |
| | | 2) | CGAGGGCCTCAACTTCAATCTCACAGAGATCCCAGAAGCCCAGATCCACGAGGGCTTCCAGGAGCTGCTGCGGACG |
| | | (SEQ ID NO: | CTCAACCAGCCTGACTCGCAGCTCCAGCTCACGACGGGCAATGGGCTCTTCCTCAGCGAGGGCCTCAAGCTCGTCGA |
| | | 751) | CAAGTTCCTGGAGGACGTCAAGAAGCTCTACCACTCGGAAGCCTTCACGGTCAACTTCGGCGACACAGAGGAAGCC |
| | | | AAGAAGCAGATCAACGACTACGTCGAGAAGGGGACTCAGGGCAAGATCGTCGACCTCGTCAAGGAGCTGGACCGA |
| | | | GACACGGTCTTCGCACTGGTCAACTACATCTTCTTCAAGGGGAAGTGGGAGCGCCCCTTCGAAGTCAAGGACACAG |
| | | | AGGAGGAGGACTTCCACGTCGACCAGGTGACGACGGTCAAGGTTCCCATGATGAAGCGCCTCGGCATGTTCAACAT |
| | | | CCAGCACTGCAAGAAGCTCAGCTCGTGGGTCCTCCTCATGAAGTACCTCGGCAACGCGACGGCGATCTTCTTCCTTC |
| | | | CTGACGAGGGCAAGCTCCAGCACCTCGAGAACGAGCTGACGCACGACATCATCACGAAGTTCCTGGAGAACGAGG |
| | | | ACCGCCGATCGGCGTCGCTCCACCTTCCAAAGCTCAGCATCACGGGCACCTACGACCTCAAGTCGGTCCTCGGCCAG |
| | | | CTCGGCATCACGAAGGTCTTCTCGAATGGTGCCGACCTCAGCGGCGTCACAGAGGAAGCCCCCCTCAAGCTCAGCA |
| | | | AGGCTGTGCACAAGGCTGTGCTCACGATCGACGAGAAGGGGACAGAGGCTGCCGGTGCCATGTTCCTGGAAGCCA |
| | | | TCCCCATGAGCATCCCACCAGAAGTCAAGTTCAACAAGCCTTTCGTCTTCCTGATGATAGAGCAGAACACGAAGTCG |
| | | | CCCCTCTTCATGGGCAAGGTCGTCAACCCCACTCAAAAG |
| | SERPINA1 | A1AT w/o | GAGGACCCCCAGGGCGACGCCGCCCAGAAGACCGACACCAGCCACCACGACCAGGACCACCCCACCTTCAACAAGA |
| | copy 2 (rev | SP | TCACCCCCAACCTGGCCGAGTTCGCCTTCAGCCTGTACAGGCAGCTGGCCCACCAGAGCAACAGCACCAACATCTTC |
| | comp) | (alternate | TTCAGCCCCGTGAGCATCGCCACCGCCTTCGCCATGCTGAGCCTGGGCACCAAGGCCGACACCCACGACGAGATCCT |
| | | codon usage | GGAGGGCCTGAACTTCAACCTGACCGAGATCCCCGAGGCCCAGATCCACGAGGGCTTCCAGGAGCTGCTGAGGACC |
| | | 1) | CTGAACCAGCCCGACAGCCAGCTGCAGCTGACCACCGGCAACGGCCTGTTCCTGAGCGAGGGCCTGAAGCTGGTGG |
| | | (SEQ ID NO: | ACAAGTTCCTGGAGGACGTGAAGAAGCTGTACCACAGCGAGGCCTTCACCGTGAACTTCGGCGACACCGAGGAGG |
| | | 752) | CCAAGAAGCAGATCAACGACTACGTGGAGAAGGGCACCCAGGGCAAGATCGTGGACCTGGTGAAGGAGCTGGAC |
| | | | AGGGACACCGTGTTCGCCCTGGTGAACTACATCTTCTTCAAGGGCAAGTGGGAGAGGCCCTTCGAGGTGAAGGACA |
| | | | CCGAGGAGGAGGACTTCCACGTGGACCAGGTGACCACCGTGAAGGTGCCCATGATGAAGAGGCTGGGCATGTTCA |
| | | | ATATCCAGCACTGCAAGAAGCTGAGCAGCTGGGTGCTGCTGATGAAGTACCTGGGCAACGCCACCGCCATCTTCTTC |
| | | | CTGCCCGACGAGGGCAAGCTGCAGCACCTGGAGAACGAGCTGACCCACGACATCATCACCAAGTTCCTGGAGAACG |
| | | | AGGACAGGAGGAGCGCCAGCCTGCACCTGCCCAAGCTGAGCATCACCGGCACCTACGACCTGAAGAGCGTGCTGG |
| | | | GCCAGCTGGGCATCACCAAGGTGTTCAGCAACGGCGCCGACCTGAGCGGCGTGACCGAGGAGGCCCCCCTGAAGC |
| | | | TGAGCAAGGCCGTGCACAAGGCCGTGCTGACCATCGACGAGAAGGGCACCGAGGCCGCCGGCGCCATGTTCCTGG |
| | | | AGGCCATCCCCATGAGCATCCCCCCCGAGGTGAAGTTCAACAAGCCTTTCGTGTTCCTGATGATCGAGCAGAACACC |
| | | | AAGAGCCCCCTGTTCATGGGCAAGGTGGTGAACCCCACCCAGAAGTAA |
| 6 | Full | (SEQ ID NO: | TTGGCCACTCCCTCTCTGCGCGCTCGCTCGCTCACTGAGGCCGGGCGACCAAAGGTCGCCCGACGCCCGGGCTTTGC |
| | Sequence | 760) | CCGGGCGGCCTCAGTGAGCGAGCGAGCGCGCAGAGAGGGAGTGGCCAACTCCATCACTAGGGGTTCCTAGATCTA |
| | | | CTAGTtaggtcagtgaagagaagaacaaaaagcagcatattacagttagttgtcttcatcaatctttaaatatgttgtgtggtttttctctccctgtttcca |
| | | | cagttGAGGACCCCCAGGGAGATGCAGCCCAGAAGACAGACACCAGCCACCATGACCAGGACCACCCCACCTTCAAC |
| | | | AAGATCACCCCCAACCTGGCAGAGTTTGCCTTCAGCCTGTACAGGCAGCTGGCCCACCAGAGCAACAGCACCAACAT |
| | | | CTTCTTCAGCCCAGTGAGCATAGCCACAGCCTTTGCCATGCTGAGCCTGGGCACCAAGGCAGACACCCATGATGAGA |
| | | | TCCTGGAGGGCCTGAACTTCAACCTGACAGAGATCCCAGAGGCCCAGATCCATGAGGGCTTCCAGGAGCTGCTGAG |
| | | | GACCCTGAACCAGCCAGACAGCCAGCTGCAGCTGACCACAGGCAATGGCCTGTTCCTGTCTGAGGGCCTGAAGCTG |
| | | | GTGGACAAGTTCCTGGAGGATGTGAAGAAGCTGTACCACTCTGAGGCCTTCACAGTGAACTTTGGAGACACAGAGG |
| | | | AGGCCAAGAAGCAGATCAATGACTATGTGGAGAAGGGCACCCAGGGCAAGATAGTGGACCTGGTGAAGGAGCTG |
| | | | GACAGGGACACAGTGTTTGCCCTGGTGAACTACATCTTCTTCAAGGGCAAGTGGGAGAGGCCCTTTGAGGTGAAGG |
| | | | ACACAGAGGAGGAGGACTTCCATGTGGACCAGGTGACCACAGTGAAGGTGCCCATGATGAAGAGGCTGGGCATGT |
| | | | TCAACATCCAGCACTGCAAGAAGCTGAGCAGCTGGGTGCTGCTGATGAAGTACCTGGGCAATGCCACAGCCATCTT |
| | | | CTTCCTGCCAGATGAGGGCAAGCTGCAGCACCTGGAGAATGAGCTGACCCATGACATCATCACCAAGTTCCTGGAG |
| | | | AATGAGGACAGGAGGTCTGCCAGCCTGCACCTGCCCAAGCTGAGCATCACAGGCACCTATGACCTGAAGTCTGTGC |
| | | | TGGGCCAGCTGGGCATCACCAAGGTGTTCAGCAATGGAGCAGACCTGTCTGGAGTGACAGAGGAGGCCCCCCTGA |
| | | | AGCTGAGCAAGGCAGTGCACAAGGCAGTGCTGACCATAGATGAGAAGGGCACAGAGGCAGCAGGAGCCATGTTCC |
| | | | TGGAGGCCATCCCCATGAGCATCCCCCCAGAGGTGAAGTTCAACAAGCCCTTTGTGTTCCTGATGATAGAGCAGAAC |
| | | | ACCAAGAGCCCCCTGTTCATGGGCAAGGTGGTGAACCCCACCCAGAAGTAACAGACATGATAAGATACATTGATGA |
| | | | GTTTGGACAAACCACAACTAGAATGCAGTGAAAAAAATGCTTTATTTGTGAAATTTGTGATGCTATTGCTTTATTTGT |
| | | | AACCATTATAAGCTGCAATAAACAAGTTAACAACAACAATTGCATTCATTTTATGTTTCAGGTTCAGGGGGAGGTGT |
| | | | GGGAGGTTTTTTggggataccccctagagccccagctggttcttttctcctcagaagCCATAGAGCCCATCTCATCCCCAGCATGCCT |
| | | | GCTATTGTCTTCCCAATCCTCCCCCTTGCTGTCCTGCCCCACCCCACCCCCCAGAATAGAATGACACCTACTCAGACAA |
| | | | TTCTATGCAATTTCCTCATTTTATTAGGAAAGGACAGTGGGAGTGGCACCTTCCAGGGTCAAGGAAGGCATGGGGG |
| | | | AGGGGCAAACAACAGATGGCTGGCAACTAGAAGGCACAGTCTaggttaTTTTTGGGTGGGATTCACCACTTTTCCCAT |
| | | | GAAGAGGGGAGACTTGGTATTTTGTTCAATCATTAAGAAGACAAAGGGTTTGTTGAACTTGACCTCTGGGGGGATA |
| | | | GACATGGGTATGGCCTCTAAAAACATGGCCCCAGCAGCTTCAGTCCCTTTCTCATCTATGGTCAGCACAGCCTTATGC |
| | | | ACTGCCTTGGAGAGCTTCAGGGGTGCCTCCTCTGTGACCCCAGAGAGGTCAGCCCCATTGCTGAAGACCTTAGTGAT |
| | | | GCCCAGTTGACCCAGGACAGACTTCAGATCATAGGTTCCAGTAATGGACAGTTTGGGTAAATGTAAGCTGGCAGAC |
| | | | CTTCTGTCTTCATTTTCCAGGAACTTGGTGATGATATCATGGGTGAGTTCATTTTCCAGGTGCTGTAGTTTCCCCTCAT |
| | | | CAGGCAGGAAGAAGATGGCTGTGGCATTGCCCAGGTATTTCATCAGCAGCACCCAGCTGGACAGCTTCTTACAGTG |
| | | | CTGGATGTTAAACATGCCTAATCTCTTCATCATAGGCACCTTCACTGTGGTCACCTGGTCCACATGGAAGTCCTCTTCC |
| | | | TCTGTGTCCTTGACTTCAAAGGGTCTCTCCCATTTGCCTTTAAAGAAGATGTAATTCACCAGAGCAAAAACTGTGTCT |
| | | | CTGTCAAGCTCCTTGACCAAATCCACAATTTTCCCTTGAGTACCCTTCTCCACATAATCATTGATCTGTTTCTTGGCCTC |
| | | | TTCTGTGTCCCCAAAGTTGACAGTGAAGGCTTCTGAGTGGTACAACTTTTTAACATCCTCCAAAAACTTATCCACTAG |
| | | | CTTCAGGCCCTCAGAGAGGAACAGGCCATTGCCTGTGGTCAGCTGGAGCTGGCTGTCTGGCTGGTTGAGGGTTCTG |
| | | | AGGAGTTCCTGGAAGCCTTCATGGATCTGAGCCTCTGGAATCTCTGTGAGGTTGAAATTCAGGCCCTCCAGGATTTC |
| | | | ATCATGAGTGTCAGCCTTGGTCCCCAGGGAGAGCATTGCAAAGGCTGTAGCTATGCTCACTGGGGAGAAGAAGATA |
| | | | TTGGTGCTGTTGGACTGGTGTGCCAGCTGTCTGTATAGGCTGAAGGCAAACTCAGCCAGGTTGGGGGTGATCTTGT |
| | | | TGAAGGTTGGGTGATCCTGATCATGGTGGGATGTATCTGTCTTCTGGGCAGCATCTCCCTGGGGATCCTCaactgtgga |
| | | | aacagggagagaaaaaccacacaacatatttaaagattgatgaagacaactaactgtaatatgctgctttttgttcttctcttcactgacctaACTAGT |
| | | | AGATCTAGGAACCCCTAGTGATGGAGTTGGCCACTCCCTCTCTGCGCGCTCGCTCGCTCACTGAGGCCGCCCGGGCA |
| | | | AAGCCCGGGCGTCGGGCGACCTTTGGTCGCCCGGCCTCAGTGAGCGAGCGAGCGCGCAGAGAGGGAGTGGCCAAa |
| | | | cgcgtggtgtaatcatggtcatagctgtttcctgtgtgaaattgttatccgctcacaattccacacaacatacgagccggaagcataaagtgtaaagcctg |
| | | | gggtgcctaatgagtgagctaactcacattaattgcgttgcgctcactgcccgctttccagtcgggaaacctgtcgtgccagctgcattaatgaatcggcc |
| | | | aacgcgcggggagaggcggtttgcgtattgggcgctcttccgcttcctcgctcactgactcgctgcgctcggtcgttcggctgcggcgagcggtatcagct |
| | | | cactcaaaggcggtaatacggttatccacagaatcaggggataacgcaggaaagaacatgtgagcaaaaggccagcaaaaggccaggaaccgtaaa |
| | | | aaggccgcgttgctggcgtttttccataggctccgcccccctgacgagcatcacaaaaatcgacgctcaagtcagaggtggcgaaacccgacaggacta |
| | | | taaagataccaggcgtttccccctggaagctccctcgtgcgctctcctgttccgaccctgccgcttaccggatacctgtccgcctttctcccttcgggaagcg |
| | | | tggcgctttctcatagctcacgctgtaggtatctcagttcggtgtaggtcgttcgctccaagctgggctgtgtgcacgaaccccccgttcagcccgaccgct |
| | | | gcgccttatccggtaactatcgtcttgagtccaacccggtaagacacgacttatcgccactggcagcagccactggtaacaggattagcagagcgaggt |
| | | | atgtaggcggtgctacagagttcttgaagtggtggcctaactacggctacactagaagaacagtatttggtatctgcgctctgctgaagccagttaccttc |
| | | | ggaaaaagagttggtagctcttgatccggcaaacaaaccaccgctggtagcggtggtttttttgtttgcaagcagcagattacgcgcagaaaaaaagga |
| | | | tctcaagaagatcctttgatcttttctacggggtctgacgctcagtggaacgaaaactcacgttaagggattttggtcatgagattatcaaaaaggatcttc |
| | | | acctagatccttttaaattaaaaatgaagttttaaatcaagcccaatctgaataatgttacaaccaattaaccaattctgattagaaaaactcatcgagca |
| | | | tcaaatgaaactgcaatttattcatatcaggattatcaataccatatttttgaaaaagccgtttctgtaatgaaggagaaaactcaccgaggcagttccat |
| | | | aggatggcaagatcctggtatcggtctgcgattccgactcgtccaacatcaatacaacctattaatttcccctcgtcaaaaataaggttatcaagtgagaa |
| | | | atcaccatgagtgacgactgaatccggtgagaatggcaaaagtttatgcatttctttccagacttgttcaacaggccagccattacgctcgtcatcaaaat |
| | | | cactcgcatcaaccaaaccgttattcattcgtgattgcgcctgagcgagacgaaatacgcgatcgctgttaaaaggacaattacaaacaggaatcgaat |
| | | | gcaaccggcgcaggaacactgccagcgcatcaacaatattttcacctgaatcaggatattcttctaatacctggaatgctgtttttccggggatcgcagtg |
| | | | gtgagtaaccatgcatcatcaggagtacggataaaatgcttgatggtcggaagaggcataaattccgtcagccagtttagtctgaccatctcatctgtaa |
| | | | catcattggcaacgctacctttgccatgtttcagaaacaactctggcgcatcgggcttcccatacaagcgatagattgtcgcacctgattgcccgacattat |
| | | | cgcgagcccatttatacccatataaatcagcatccatgttggaatttaatcgcggcctcgacgtttcccgttgaatatggctcataacaccccttgtattact |
| | | | gtttatgtaagcagacagttttattgttcatgatgatatatttttatcttgtgcaatgtaacatcagagattttgagacacgggccagagctgcatcgcgcgt |
| | | | ttcggtgatgacggtgaaaacctctgacacatgcagctcccggagacggtcacagcttgtctgtaagcggatgccgggagcagacaagcccgtcagggc |
| | | | gcgtcagcgggtgttggcgggtgtcggggctggcttaactatgcggcatcagagcagattgtactgagagtgcaccatatgcggtgtgaaataccgcac |
| | | | agatgcgtaaggagaaaataccgcatcaggcgccattcgccattcaggctgcgcaactgttgggaagggcgatcggtgcgggcctcttcgctattacgc |
| | | | cagctggcgaaagggggatgtgctgcaaggcgattaagttgggtaacgccagggttttcccagtcacgacgttgtaaaacgacggccagagaattc |
| | SERPINA1 | A1AT w/o | GAGGACCCCCAGGGAGATGCAGCCCAGAAGACAGACACCAGCCACCATGACCAGGACCACCCCACCTTCAACAAGA |
| | copy 1 | SP | TCACCCCCAACCTGGCAGAGTTTGCCTTCAGCCTGTACAGGCAGCTGGCCCACCAGAGCAACAGCACCAACATCTTC |
| | | (alternate | TTCAGCCCAGTGAGCATAGCCACAGCCTTTGCCATGCTGAGCCTGGGCACCAAGGCAGACACCCATGATGAGATCCT |
| | | codon usage | GGAGGGCCTGAACTTCAACCTGACAGAGATCCCAGAGGCCCAGATCCATGAGGGCTTCCAGGAGCTGCTGAGGAC |
| | | 1) CpG | CCTGAACCAGCCAGACAGCCAGCTGCAGCTGACCACAGGCAATGGCCTGTTCCTGTCTGAGGGCCTGAAGCTGGTG |
| | | depleted | GACAAGTTCCTGGAGGATGTGAAGAAGCTGTACCACTCTGAGGCCTTCACAGTGAACTTTGGAGACACAGAGGAGG |
| | | (SEQ ID NO: | CCAAGAAGCAGATCAATGACTATGTGGAGAAGGGCACCCAGGGCAAGATAGTGGACCTGGTGAAGGAGCTGGAC |
| | | 761) | AGGGACACAGTGTTTGCCCTGGTGAACTACATCTTCTTCAAGGGCAAGTGGGAGAGGCCCTTTGAGGTGAAGGACA |
| | | | CAGAGGAGGAGGACTTCCATGTGGACCAGGTGACCACAGTGAAGGTGCCCATGATGAAGAGGCTGGGCATGTTCA |
| | | | ACATCCAGCACTGCAAGAAGCTGAGCAGCTGGGTGCTGCTGATGAAGTACCTGGGCAATGCCACAGCCATCTTCTTC |
| | | | CTGCCAGATGAGGGCAAGCTGCAGCACCTGGAGAATGAGCTGACCCATGACATCATCACCAAGTTCCTGGAGAATG |
| | | | AGGACAGGAGGTCTGCCAGCCTGCACCTGCCCAAGCTGAGCATCACAGGCACCTATGACCTGAAGTCTGTGCTGGG |
| | | | CCAGCTGGGCATCACCAAGGTGTTCAGCAATGGAGCAGACCTGTCTGGAGTGACAGAGGAGGCCCCCCTGAAGCT |
| | | | GAGCAAGGCAGTGCACAAGGCAGTGCTGACCATAGATGAGAAGGGCACAGAGGCAGCAGGAGCCATGTTCCTGG |
| | | | AGGCCATCCCCATGAGCATCCCCCCAGAGGTGAAGTTCAACAAGCCCTTTGTGTTCCTGATGATAGAGCAGAACACC |
| | | | AAGAGCCCCCTGTTCATGGGCAAGGTGGTGAACCCCACCCAGAAGTAA |
| | SERPINA1 | A1AT w/o | GAGGATCCCCAGGGAGATGCTGCCCAGAAGACAGATACATCCCACCATGATCAGGATCACCCAACCTTCAACAAGA |
| | copy 2 (rev | SP CpG | TCACCCCCAACCTGGCTGAGTTTGCCTTCAGCCTATACAGACAGCTGGCACACCAGTCCAACAGCACCAATATCTTCT |
| | comp) | depleted | TCTCCCCAGTGAGCATAGCTACAGCCTTTGCAATGCTCTCCCTGGGGACCAAGGCTGACACTCATGATGAAATCCTG |
| | | (SEQ ID NO: | GAGGGCCTGAATTTCAACCTCACAGAGATTCCAGAGGCTCAGATCCATGAAGGCTTCCAGGAACTCCTCAGAACCCT |
| | | 762) | CAACCAGCCAGACAGCCAGCTCCAGCTGACCACAGGCAATGGCCTGTTCCTCTCTGAGGGCCTGAAGCTAGTGGAT |
| | | | AAGTTTTTGGAGGATGTTAAAAAGTTGTACCACTCAGAAGCCTTCACTGTCAACTTTGGGGACACAGAAGAGGCCAA |
| | | | GAAACAGATCAATGATTATGTGGAGAAGGGTACTCAAGGGAAAATTGTGGATTTGGTCAAGGAGCTTGACAGAGA |
| | | | CACAGTTTTTGCTCTGGTGAATTACATCTTCTTTAAAGGCAAATGGGAGAGACCCTTTGAAGTCAAGGACACAGAGG |
| | | | AAGAGGACTTCCATGTGGACCAGGTGACCACAGTGAAGGTGCCTATGATGAAGAGATTAGGCATGTTTAACATCCA |
| | | | GCACTGTAAGAAGCTGTCCAGCTGGGTGCTGCTGATGAAATACCTGGGCAATGCCACAGCCATCTTCTTCCTGCCTG |
| | | | ATGAGGGGAAACTACAGCACCTGGAAAATGAACTCACCCATGATATCATCACCAAGTTCCTGGAAAATGAAGACAG |
| | | | AAGGTCTGCCAGCTTACATTTACCCAAACTGTCCATTACTGGAACCTATGATCTGAAGTCTGTCCTGGGTCAACTGGG |
| | | | CATCACTAAGGTCTTCAGCAATGGGGCTGACCTCTCTGGGGTCACAGAGGAGGCACCCCTGAAGCTCTCCAAGGCA |
| | | | GTGCATAAGGCTGTGCTGACCATAGATGAGAAAGGGACTGAAGCTGCTGGGGCCATGTTTTTAGAGGCCATACCCA |
| | | | TGTCTATCCCCCCAGAGGTCAAGTTCAACAAACCCTTTGTCTTCTTAATGATTGAACAAAATACCAAGTCTCCCCTCTT |
| | | | CATGGGAAAAGTGGTGAATCCCACCCAAAAAtaa |
| 9 | Full | (SEQ ID NO: | TTGGCCACTCCCTCTCTGCGCGCTCGCTCGCTCACTGAGGCCGGGCGACCAAAGGTCGCCCGACGCCCGGGCTTTGC |
| | Sequence | 790) | CCGGGCGGCCTCAGTGAGCGAGCGAGCGCGCAGAGAGGGAGTGGCCAACTCCATCACTAGGGGTTCCTAGATCTA |
| | | | CTAGTATAACTTCGTATAGCATACATTATACGAAGTTATATGTATGCtaggtcagtgaagagaagaacaaaaagcagcatattaca |
| | | | gttagttgtcttcatcaatctttaaatatgttgtgtggtttttctctccctgtttccacagttGAGGACCCCCAGGGAGATGCTGCCCAGAAGA |
| | | | CAGACACATCTCACCATGACCAGGACCACCCCACCTTCAACAAGATCACTCCCAATCTTGCAGAGTTTGCATTCTCTCT |
| | | | CTACAGACAGCTTGCACACCAGAGCAACTCTACTAACATCTTCTTCTCTCCAGTCAGCATAGCAACAGCATTTGCAAT |
| | | | GCTCAGCCTTGGCACAAAGGCAGACACACATGATGAGATCCTTGAGGGCCTCAACTTCAATCTCACAGAGATCCCAG |
| | | | AAGCCCAGATCCATGAGGGCTTCCAGGAGCTGCTGAGAACACTCAACCAGCCTGACTCTCAGCTCCAGCTCACAACA |
| | | | GGCAATGGGCTCTTCCTCTCTGAGGGCCTCAAGCTTGTAGACAAGTTCCTGGAGGATGTCAAGAAGCTCTACCACTC |
| | | | TGAAGCCTTCACAGTCAACTTTGGAGACACAGAGGAAGCCAAGAAGCAGATCAATGACTATGTAGAGAAGGGGAC |
| | | | TCAGGGCAAGATAGTAGACCTTGTCAAGGAGCTGGACAGAGACACAGTCTTTGCACTGGTCAACTACATCTTCTTCA |
| | | | AGGGGAAGTGGGAGAGACCCTTTGAAGTCAAGGACACAGAGGAGGAGGACTTCCATGTAGACCAGGTGACAACA |
| | | | GTCAAGGTTCCCATGATGAAGAGACTTGGCATGTTCAATATCCAGCACTGCAAGAAGCTCAGCTCTTGGGTCCTCCT |
| | | | CATGAAGTACCTTGGCAATGCAACAGCAATCTTCTTCCTTCCTGATGAGGGCAAGCTCCAGCACCTTGAGAATGAGC |
| | | | TGACACATGACATCATCACAAAGTTCCTGGAGAATGAGGACAGAAGGTCTGCATCTCTCCACCTTCCAAAGCTCAGC |
| | | | ATCACAGGCACCTATGACCTCAAGTCTGTCCTTGGCCAGCTTGGCATCACAAAGGTCTTCTCTAATGGTGCAGACCTC |
| | | | TCTGGAGTCACAGAGGAAGCCCCCCTCAAGCTCAGCAAGGCTGTGCACAAGGCTGTGCTCACAATAGATGAGAAGG |
| | | | GGACAGAGGCTGCAGGTGCCATGTTCCTGGAAGCCATCCCCATGAGCATCCCACCAGAAGTCAAGTTCAACAAGCC |
| | | | TTTTGTCTTCCTGATGATAGAGCAGAACACAAAGTCTCCCCTCTTCATGGGCAAGGTAGTCAACCCCACTCAAAAGTA |
| | | | ACAGACATGATAAGATACATTGATGAGTTTGGACAAACCACAACTAGAATGCAGTGAAAAAAATGCTTTATTTGTGA |
| | | | AATTTGTGATGCTATTGCTTTATTTGTAACCATTATAAGCTGCAATAAACAAGTTAACAACAACAATTGCATTCATTTT |
| | | | ATGTTTCAGGTTCAGGGGGAGGTGTGGGAGGTTTTTTggggataccccctagagccccagctggttcttttctcctcagaagCCATA |
| | | | GAGCCCATCTCATCCCCAGCATGCCTGCTATTGTCTTCCCAATCCTCCCCCTTGCTGTCCTGCCCCACCCCACCCCCCA |
| | | | GAATAGAATGACACCTACTCAGACAATTCTATGCAATTTCCTCATTTTATTAGGAAAGGACAGTGGGAGTGGCACCT |
| | | | TCCAGGGTCAAGGAAGGCATGGGGGAGGGGCAAACAACAGATGGCTGGCAACTAGAAGGCACAGTCTaggTTACT |
| | | | TCTGGGTGGGGTTCACCACCTTGCCCATGAACAGGGGGCTCTTGGTGTTCTGCTCTATCATCAGGAACACAAAAGGC |
| | | | TTGTTGAACTTCACCTCTGGGGGGATGCTCATGGGGATGGCCTCCAGGAACATGGCTCCTGCTGCCTCTGTGCCCTT |
| | | | CTCATCTATGGTCAGCACTGCCTTGTGCACTGCCTTGCTCAGCTTCAGGGGGGCCTCCTCTGTCACTCCAGACAGGTC |
| | | | TGCTCCATTGCTGAACACCTTGGTGATGCCCAGCTGGCCCAGCACAGACTTCAGGTCATAGGTGCCTGTGATGCTCA |
| | | | GCTTGGGCAGGTGCAGGCTGGCAGACCTCCTGTCCTCATTCTCCAGGAACTTGGTGATGATGTCATGGGTCAGCTCA |
| | | | TTCTCCAGGTGCTGCAGCTTGCCCTCATCTGGCAGGAAGAAGATGGCTGTGGCATTGCCCAGGTACTTCATCAGCAG |
| | | | CACCCAGCTGCTCAGCTTCTTGCAGTGCTGGATATTGAACATGCCCAGCCTCTTCATCATGGGCACCTTCACTGTGGT |
| | | | CACCTGGTCCACATGGAAGTCCTCCTCCTCTGTGTCCTTCACCTCAAAGGGCCTCTCCCACTTGCCCTTGAAGAAGAT |
| | | | GTAGTTCACCAGGGCAAACACTGTGTCCCTGTCCAGCTCCTTCACCAGGTCCACTATCTTGCCCTGGGTGCCCTTCTC |
| | | | CACATAGTCATTGATCTGCTTCTTGGCCTCCTCTGTGTCTCCAAAGTTCACTGTGAAGGCCTCAGAGTGGTACAGCTT |
| | | | CTTCACATCCTCCAGGAACTTGTCCACCAGCTTCAGGCCCTCAGACAGGAACAGGCCATTGCCTGTGGTCAGCTGCA |
| | | | GCTGGCTGTCTGGCTGGTTCAGGGTCCTCAGCAGCTCCTGGAAGCCCTCATGGATCTGGGCCTCTGGGATCTCTGTC |
| | | | AGGTTGAAGTTCAGGCCCTCCAGGATCTCATCATGGGTGTCTGCCTTGGTGCCCAGGCTCAGCATGGCAAAGGCTGT |
| | | | GGCTATGCTCACTGGGCTGAAGAAGATGTTGGTGCTGTTGCTCTGGTGGGCCAGCTGCCTGTACAGGCTGAAGGCA |
| | | | AACTCTGCCAGGTTGGGGGTGATCTTGTTGAAGGTGGGGTGGTCCTGGTCATGGTGGCTGGTGTCTGTCTTCTGGG |
| | | | CTGCATCTCCCTGGGGGTCCTCaactgtggaaacagggagagaaaaaccacacaacatatttaaagattgatgaagacaactaactgtaata |
| | | | tgctgctttttgttcttctcttcactgacctaATGTATGCATAACTTCGTATAGCATACATTATACGAAGTTATACTAGTAGATCTA |
| | | | GGAACCCCTAGTGATGGAGTTGGCCACTCCCTCTCTGCGCGCTCGCTCGCTCACTGAGGCCGCCCGGGCAAAGCCC |
| | | | GGGCGTCGGGCGACCTTTGGTCGCCCGGCCTCAGTGAGCGAGCGAGCGCGCAGAGAGGGAGTGGCCAAacgcgtggt |
| | | | gtaatcatggtcatagctgtttcctgtgtgaaattgttatccgctcacaattccacacaacatacgagccggaagcataaagtgtaaagcctggggtgcct |
| | | | aatgagtgagctaactcacattaattgcgttgcgctcactgcccgctttccagtcgggaaacctgtcgtgccagctgcattaatgaatcggccaacgcgcg |
| | | | gggagaggcggtttgcgtattgggcgctcttccgcttcctcgctcactgactcgctgcgctcggtcgttcggctgcggcgagcggtatcagctcactcaaa |
| | | | ggcggtaatacggttatccacagaatcaggggataacgcaggaaagaacatgtgagcaaaaggccagcaaaaggccaggaaccgtaaaaaggccgc |
| | | | gttgctggcgtttttccataggctccgcccccctgacgagcatcacaaaaatcgacgctcaagtcagaggtggcgaaacccgacaggactataaagata |
| | | | ccaggcgtttccccctggaagctccctcgtgcgctctcctgttccgaccctgccgcttaccggatacctgtccgcctttctcccttcgggaagcgtggcgctt |
| | | | tctcatagctcacgctgtaggtatctcagttcggtgtaggtcgttcgctccaagctgggctgtgtgcacgaaccccccgttcagcccgaccgctgcgcctta |
| | | | tccggtaactatcgtcttgagtccaacccggtaagacacgacttatcgccactggcagcagccactggtaacaggattagcagagcgaggtatgtaggc |
| | | | ggtgctacagagttcttgaagtggtggcctaactacggctacactagaagaacagtatttggtatctgcgctctgctgaagccagttaccttcggaaaaa |
| | | | gagttggtagctcttgatccggcaaacaaaccaccgctggtagcggtggtttttttgtttgcaagcagcagattacgcgcagaaaaaaaggatctcaaga |
| | | | agatcctttgatcttttctacggggtctgacgctcagtggaacgaaaactcacgttaagggattttggtcatgagattatcaaaaaggatcttcacctagat |
| | | | ccttttaaattaaaaatgaagttttaaatcaagcccaatctgaataatgttacaaccaattaaccaattctgattagaaaaactcatcgagcatcaaatga |
| | | | aactgcaatttattcatatcaggattatcaataccatatttttgaaaaagccgtttctgtaatgaaggagaaaactcaccgaggcagttccataggatggc |
| | | | aagatcctggtatcggtctgcgattccgactcgtccaacatcaatacaacctattaatttcccctcgtcaaaaataaggttatcaagtgagaaatcaccat |
| | | | gagtgacgactgaatccggtgagaatggcaaaagtttatgcatttctttccagacttgttcaacaggccagccattacgctcgtcatcaaaatcactcgca |
| | | | tcaaccaaaccgttattcattcgtgattgcgcctgagcgagacgaaatacgcgatcgctgttaaaaggacaattacaaacaggaatcgaatgcaaccgg |
| | | | cgcaggaacactgccagcgcatcaacaatattttcacctgaatcaggatattcttctaatacctggaatgctgtttttccggggatcgcagtggtgagtaa |
| | | | ccatgcatcatcaggagtacggataaaatgcttgatggtcggaagaggcataaattccgtcagccagtttagtctgaccatctcatctgtaacatcattgg |
| | | | caacgctacctttgccatgtttcagaaacaactctggcgcatcgggcttcccatacaagcgatagattgtcgcacctgattgcccgacattatcgcgagcc |
| | | | catttatacccatataaatcagcatccatgttggaatttaatcgcggcctcgacgtttcccgttgaatatggctcataacaccccttgtattactgtttatgta |
| | | | agcagacagttttattgttcatgatgatatatttttatcttgtgcaatgtaacatcagagattttgagacacgggccagagctgcatcgcgcgtttcggtgat |
| | | | gacggtgaaaacctctgacacatgcagctcccggagacggtcacagcttgtctgtaagcggatgccgggagcagacaagcccgtcagggcgcgtcagc |
| | | | gggtgttggcgggtgtcggggctggcttaactatgcggcatcagagcagattgtactgagagtgcaccatatgcggtgtgaaataccgcacagatgcgt |
| | | | aaggagaaaataccgcatcaggcgccattcgccattcaggctgcgcaactgttgggaagggcgatcggtgcgggcctcttcgctattacgccagctggc |
| | | | gaaagggggatgtgctgcaaggcgattaagttgggtaacgccagggttttcccagtcacgacgttgtaaaacgacggccagagaattc |
| | SERPINA1 | A1AT w/o | GAGGACCCCCAGGGAGATGCTGCCCAGAAGACAGACACATCTCACCATGACCAGGACCACCCCACCTTCAACAAGA |
| | copy 1 | SP | TCACTCCCAATCTTGCAGAGTTTGCATTCTCTCTCTACAGACAGCTTGCACACCAGAGCAACTCTACTAACATCTTCTT |
| | | (alternate | CTCTCCAGTCAGCATAGCAACAGCATTTGCAATGCTCAGCCTTGGCACAAAGGCAGACACACATGATGAGATCCTTG |
| | | codon usage | AGGGCCTCAACTTCAATCTCACAGAGATCCCAGAAGCCCAGATCCATGAGGGCTTCCAGGAGCTGCTGAGAACACT |
| | | 2) CpG | CAACCAGCCTGACTCTCAGCTCCAGCTCACAACAGGCAATGGGCTCTTCCTCTCTGAGGGCCTCAAGCTTGTAGACA |
| | | depleted | AGTTCCTGGAGGATGTCAAGAAGCTCTACCACTCTGAAGCCTTCACAGTCAACTTTGGAGACACAGAGGAAGCCAA |
| | | (SEQ ID NO: | GAAGCAGATCAATGACTATGTAGAGAAGGGGACTCAGGGCAAGATAGTAGACCTTGTCAAGGAGCTGGACAGAGA |
| | | 791) | CACAGTCTTTGCACTGGTCAACTACATCTTCTTCAAGGGGAAGTGGGAGAGACCCTTTGAAGTCAAGGACACAGAG |
| | | | GAGGAGGACTTCCATGTAGACCAGGTGACAACAGTCAAGGTTCCCATGATGAAGAGACTTGGCATGTTCAATATCC |
| | | | AGCACTGCAAGAAGCTCAGCTCTTGGGTCCTCCTCATGAAGTACCTTGGCAATGCAACAGCAATCTTCTTCCTTCCTG |
| | | | ATGAGGGCAAGCTCCAGCACCTTGAGAATGAGCTGACACATGACATCATCACAAAGTTCCTGGAGAATGAGGACAG |
| | | | AAGGTCTGCATCTCTCCACCTTCCAAAGCTCAGCATCACAGGCACCTATGACCTCAAGTCTGTCCTTGGCCAGCTTGG |
| | | | CATCACAAAGGTCTTCTCTAATGGTGCAGACCTCTCTGGAGTCACAGAGGAAGCCCCCCTCAAGCTCAGCAAGGCTG |
| | | | TGCACAAGGCTGTGCTCACAATAGATGAGAAGGGGACAGAGGCTGCAGGTGCCATGTTCCTGGAAGCCATCCCCAT |
| | | | GAGCATCCCACCAGAAGTCAAGTTCAACAAGCCTTTTGTCTTCCTGATGATAGAGCAGAACACAAAGTCTCCCCTCTT |
| | | | CATGGGCAAGGTAGTCAACCCCACTCAAAAG |
| | SERPINA1 | A1AT w/o | GAGGACCCCCAGGGAGATGCAGCCCAGAAGACAGACACCAGCCACCATGACCAGGACCACCCCACCTTCAACAAGA |
| | copy 2 (rev | SP | TCACCCCCAACCTGGCAGAGTTTGCCTTCAGCCTGTACAGGCAGCTGGCCCACCAGAGCAACAGCACCAACATCTTC |
| | comp) | (alternate | TTCAGCCCAGTGAGCATAGCCACAGCCTTTGCCATGCTGAGCCTGGGCACCAAGGCAGACACCCATGATGAGATCCT |
| | | codon usage | GGAGGGCCTGAACTTCAACCTGACAGAGATCCCAGAGGCCCAGATCCATGAGGGCTTCCAGGAGCTGCTGAGGAC |
| | | 1) CpG | CCTGAACCAGCCAGACAGCCAGCTGCAGCTGACCACAGGCAATGGCCTGTTCCTGTCTGAGGGCCTGAAGCTGGTG |
| | | depleted | GACAAGTTCCTGGAGGATGTGAAGAAGCTGTACCACTCTGAGGCCTTCACAGTGAACTTTGGAGACACAGAGGAGG |
| | | (SEQ ID NO: | CCAAGAAGCAGATCAATGACTATGTGGAGAAGGGCACCCAGGGCAAGATAGTGGACCTGGTGAAGGAGCTGGAC |
| | | 792) | AGGGACACAGTGTTTGCCCTGGTGAACTACATCTTCTTCAAGGGCAAGTGGGAGAGGCCCTTTGAGGTGAAGGACA |
| | | | CAGAGGAGGAGGACTTCCATGTGGACCAGGTGACCACAGTGAAGGTGCCCATGATGAAGAGGCTGGGCATGTTCA |
| | | | ATATCCAGCACTGCAAGAAGCTGAGCAGCTGGGTGCTGCTGATGAAGTACCTGGGCAATGCCACAGCCATCTTCTTC |
| | | | CTGCCAGATGAGGGCAAGCTGCAGCACCTGGAGAATGAGCTGACCCATGACATCATCACCAAGTTCCTGGAGAATG |
| | | | AGGACAGGAGGTCTGCCAGCCTGCACCTGCCCAAGCTGAGCATCACAGGCACCTATGACCTGAAGTCTGTGCTGGG |
| | | | CCAGCTGGGCATCACCAAGGTGTTCAGCAATGGAGCAGACCTGTCTGGAGTGACAGAGGAGGCCCCCCTGAAGCT |
| | | | GAGCAAGGCAGTGCACAAGGCAGTGCTGACCATAGATGAGAAGGGCACAGAGGCAGCAGGAGCCATGTTCCTGG |
| | | | AGGCCATCCCCATGAGCATCCCCCCAGAGGTGAAGTTCAACAAGCCTTTTGTGTTCCTGATGATAGAGCAGAACACC |
| | | | AAGAGCCCCCTGTTCATGGGCAAGGTGGTGAACCCCACCCAGAAGTAA |
| 10 | Full | (SEQ ID NO: | TTGGCCACTCCCTCTCTGCGCGCTCGCTCGCTCACTGAGGCCGGGCGACCAAAGGTCGCCCGACGCCCGGGCTTTGC |
| | Sequence | 795 | CCGGGCGGCCTCAGTGAGCGAGCGAGCGCGCAGAGAGGGAGTGGCCAACTCCATCACTAGGGGTTCCTAGATCTA |
| | | | CTAGTATAACTTCGTATAGCATACATTATACGAAGTTATATGTATGCtaggtcagtgaagagaagaacaaaaagcagcatattaca |
| | | | gttagttgtcttcatcaatctttaaatatgttgtgtggtttttctctccctgtttccacagttGAGGACCCCCAGGGAGATGCAGCCCAGAAGA |
| | | | CAGACACCAGCCACCATGACCAGGACCACCCCACCTTCAACAAGATCACCCCCAACCTGGCAGAGTTTGCCTTCAGC |
| | | | CTGTACAGGCAGCTGGCCCACCAGAGCAACAGCACCAACATCTTCTTCAGCCCAGTGAGCATAGCCACAGCCTTTGC |
| | | | CATGCTGAGCCTGGGCACCAAGGCAGACACCCATGATGAGATCCTGGAGGGCCTGAACTTCAACCTGACAGAGATC |
| | | | CCAGAGGCCCAGATCCATGAGGGCTTCCAGGAGCTGCTGAGGACCCTGAACCAGCCAGACAGCCAGCTGCAGCTG |
| | | | ACCACAGGCAATGGCCTGTTCCTGTCTGAGGGCCTGAAGCTGGTGGACAAGTTCCTGGAGGATGTGAAGAAGCTGT |
| | | | ACCACTCTGAGGCCTTCACAGTGAACTTTGGAGACACAGAGGAGGCCAAGAAGCAGATCAATGACTATGTGGAGAA |
| | | | GGGCACCCAGGGCAAGATAGTGGACCTGGTGAAGGAGCTGGACAGGGACACAGTGTTTGCCCTGGTGAACTACAT |
| | | | CTTCTTCAAGGGCAAGTGGGAGAGGCCCTTTGAGGTGAAGGACACAGAGGAGGAGGACTTCCATGTGGACCAGGT |
| | | | GACCACAGTGAAGGTGCCCATGATGAAGAGGCTGGGCATGTTCAATATCCAGCACTGCAAGAAGCTGAGCAGCTG |
| | | | GGTGCTGCTGATGAAGTACCTGGGCAATGCCACAGCCATCTTCTTCCTGCCAGATGAGGGCAAGCTGCAGCACCTG |
| | | | GAGAATGAGCTGACCCATGACATCATCACCAAGTTCCTGGAGAATGAGGACAGGAGGTCTGCCAGCCTGCACCTGC |
| | | | CCAAGCTGAGCATCACAGGCACCTATGACCTGAAGTCTGTGCTGGGCCAGCTGGGCATCACCAAGGTGTTCAGCAA |
| | | | TGGAGCAGACCTGTCTGGAGTGACAGAGGAGGCCCCCCTGAAGCTGAGCAAGGCAGTGCACAAGGCAGTGCTGAC |
| | | | CATAGATGAGAAGGGCACAGAGGCAGCAGGAGCCATGTTCCTGGAGGCCATCCCCATGAGCATCCCCCCAGAGGT |
| | | | GAAGTTCAACAAGCCTTTTGTGTTCCTGATGATAGAGCAGAACACCAAGAGCCCCCTGTTCATGGGCAAGGTGGTG |
| | | | AACCCCACCCAGAAGTAACAGACATGATAAGATACATTGATGAGTTTGGACAAACCACAACTAGAATGCAGTGAAA |
| | | | AAAATGCTTTATTTGTGAAATTTGTGATGCTATTGCTTTATTTGTAACCATTATAAGCTGCAATAAACAAGTTAACAAC |
| | | | AACAATTGCATTCATTTTATGTTTCAGGTTCAGGGGGAGGTGTGGGAGGTTTTTTggggataccccctagagccccagctggtt |
| | | | cttttctcctcagaagCCATAGAGCCCATCTCATCCCCAGCATGCCTGCTATTGTCTTCCCAATCCTCCCCCTTGCTGTCCTG |
| | | | CCCCACCCCACCCCCCAGAATAGAATGACACCTACTCAGACAATTCTATGCAATTTCCTCATTTTATTAGGAAAGGAC |
| | | | AGTGGGAGTGGCACCTTCCAGGGTCAAGGAAGGCATGGGGGAGGGGCAAACAACAGATGGCTGGCAACTAGAAG |
| | | | GCACAGTCTaggttaTTTTTGGGTGGGATTCACCACTTTTCCCATGAAGAGGGGTGATTTAGTGTTCTGCTCTATCATG |
| | | | AGAAATACAAAAGGTTTGTTGAACTTGACCTCTGGGGGGATAGACATGGGTATGGCCTCTAAAAACATGGCCCCAG |
| | | | CAGCCTCTGTGCCCTTCTCATCTATGGTCAGCACAGCCTTATGCACTGCCTTGGAGAGCTTCAGGGGTGCCTCCTCTG |
| | | | TGACCCCAGAGAGGTCAGCCCCATTGCTGAAGACCTTAGTGATGCCCAGTTGACCCAGGACAGACTTCAGATCATAG |
| | | | GTTCCAGTAATGGACAGTTTGGGTAAATGTAAGCTGGCAGACCTTCTGTCTTCATTTTCCAGGAACTTGGTGATGAT |
| | | | ATCATGGGTGAGTTCATTTTCCAGGTGCTGTAGTTTCCCCTCATCAGGCAGGAAGAAGATGGCTGTGGCATTGCCCA |
| | | | GGTATTTCATCAGCAGCACCCAGCTGGACAGCTTCTTACAGTGCTGGATATTGAACATACCAAGCCTTTTCATCATAG |
| | | | GCACCTTCACTGTGGTCACCTGGTCCACATGGAAGTCCTCTTCCTCTGTGTCCTTGACTTCAAAGGGTCTCTCCCATTT |
| | | | GCCTTTAAAGAAGATGTAATTCACCAGAGCAAAAACTGTGTCTCTGTCAAGCTCCTTGACCAAATCCACAATTTTCCC |
| | | | TTGAGTACCCTTCTCCACATAATCATTGATCTGTTTCTTGGCCTCTTCTGTGTCCCCAAAGTTGACAGTGAAGGCTTCT |
| | | | GAGTGGTACAACTTTTTAACATCCTCCAAAAACTTATCCACTAGCTTCAGGCCCTCAGAGAGGAACAGGCCATTGCCT |
| | | | GTGGTCAGCTGGAGCTGGCTGTCTGGCTGGTTGAGGGTTCTGAGGAGTTCCTGGAAGCCTTCATGGATCTGAGCCT |
| | | | CTGGAATCTCTGTGAGGTTGAAATTCAGGCCCTCCAGGATTTCATCATGAGTGTCAGCCTTGGTCCCCAGGGAGAGC |
| | | | ATTGCAAAGGCTGTAGCTATGCTCACTGGGGAGAAGAAGATATTGGTGCTGTTGGACTGGTGTGCCAGCTGTCTGT |
| | | | ATAGGCTGAAGGCAAACTCAGCCAGGTTGGGGGTGATCTTGTTGAAGGTTGGGTGATCCTGATCATGGTGGGATGT |
| | | | ATCTGTCTTCTGGGCAGCATCTCCCTGGGGATCCTCaactgtggaaacagggagagaaaaaccacacaacatatttaaagattgatga |
| | | | agacaactaactgtaatatgctgctttttgttcttctcttcactgacctaATGTATGCATAACTTCGTATAGCATACATTATACGAAGTTA |
| | | | TACTAGTAGATCTAGGAACCCCTAGTGATGGAGTTGGCCACTCCCTCTCTGCGCGCTCGCTCGCTCACTGAGGCCGC |
| | | | CCGGGCAAAGCCCGGGCGTCGGGCGACCTTTGGTCGCCCGGCCTCAGTGAGCGAGCGAGCGCGCAGAGAGGGAG |
| | | | TGGCCAAacgcgtggtgtaatcatggtcatagctgtttcctgtgtgaaattgttatccgctcacaattccacacaacatacgagccggaagcataaagt |
| | | | gtaaagcctggggtgcctaatgagtgagctaactcacattaattgcgttgcgctcactgcccgctttccagtcgggaaacctgtcgtgccagctgcattaa |
| | | | tgaatcggccaacgcgcggggagaggcggtttgcgtattgggcgctcttccgcttcctcgctcactgactcgctgcgctcggtcgttcggctgcggcgagc |
| | | | ggtatcagctcactcaaaggcggtaatacggttatccacagaatcaggggataacgcaggaaagaacatgtgagcaaaaggccagcaaaaggccag |
| | | | gaaccgtaaaaaggccgcgttgctggcgtttttccataggctccgcccccctgacgagcatcacaaaaatcgacgctcaagtcagaggtggcgaaaccc |
| | | | gacaggactataaagataccaggcgtttccccctggaagctccctcgtgcgctctcctgttccgaccctgccgcttaccggatacctgtccgcctttctccct |
| | | | tcgggaagcgtggcgctttctcatagctcacgctgtaggtatctcagttcggtgtaggtcgttcgctccaagctgggctgtgtgcacgaaccccccgttcag |
| | | | cccgaccgctgcgccttatccggtaactatcgtcttgagtccaacccggtaagacacgacttatcgccactggcagcagccactggtaacaggattagca |
| | | | gagcgaggtatgtaggcggtgctacagagttcttgaagtggtggcctaactacggctacactagaagaacagtatttggtatctgcgctctgctgaagcc |
| | | | agttaccttcggaaaaagagttggtagctcttgatccggcaaacaaaccaccgctggtagcggtggtttttttgtttgcaagcagcagattacgcgcaga |
| | | | aaaaaaggatctcaagaagatcctttgatcttttctacggggtctgacgctcagtggaacgaaaactcacgttaagggattttggtcatgagattatcaa |
| | | | aaaggatcttcacctagatccttttaaattaaaaatgaagttttaaatcaagcccaatctgaataatgttacaaccaattaaccaattctgattagaaaaa |
| | | | ctcatcgagcatcaaatgaaactgcaatttattcatatcaggattatcaataccatatttttgaaaaagccgtttctgtaatgaaggagaaaactcaccga |
| | | | ggcagttccataggatggcaagatcctggtatcggtctgcgattccgactcgtccaacatcaatacaacctattaatttcccctcgtcaaaaataaggtta |
| | | | tcaagtgagaaatcaccatgagtgacgactgaatccggtgagaatggcaaaagtttatgcatttctttccagacttgttcaacaggccagccattacgctc |
| | | | gtcatcaaaatcactcgcatcaaccaaaccgttattcattcgtgattgcgcctgagcgagacgaaatacgcgatcgctgttaaaaggacaattacaaaca |
| | | | ggaatcgaatgcaaccggcgcaggaacactgccagcgcatcaacaatattttcacctgaatcaggatattcttctaatacctggaatgctgtttttccggg |
| | | | gatcgcagtggtgagtaaccatgcatcatcaggagtacggataaaatgcttgatggtcggaagaggcataaattccgtcagccagtttagtctgaccatc |
| | | | tcatctgtaacatcattggcaacgctacctttgccatgtttcagaaacaactctggcgcatcgggcttcccatacaagcgatagattgtcgcacctgattgc |
| | | | ccgacattatcgcgagcccatttatacccatataaatcagcatccatgttggaatttaatcgcggcctcgacgtttcccgttgaatatggctcataacaccc |
| | | | cttgtattactgtttatgtaagcagacagttttattgttcatgatgatatatttttatcttgtgcaatgtaacatcagagattttgagacacgggccagagctg |
| | | | catcgcgcgtttcggtgatgacggtgaaaacctctgacacatgcagctcccggagacggtcacagcttgtctgtaagcggatgccgggagcagacaagc |
| | | | ccgtcagggcgcgtcagcgggtgttggcgggtgtcggggctggcttaactatgcggcatcagagcagattgtactgagagtgcaccatatgcggtgtga |
| | | | aataccgcacagatgcgtaaggagaaaataccgcatcaggcgccattcgccattcaggctgcgcaactgttgggaagggcgatcggtgcgggcctcttc |
| | | | gctattacgccagctggcgaaagggggatgtgctgcaaggcgattaagttgggtaacgccagggttttcccagtcacgacgttgtaaaacgacggccag |
| | | | agaattc |
| | SERPINA1 | A1AT w/o | GAGGACCCCCAGGGAGATGCAGCCCAGAAGACAGACACCAGCCACCATGACCAGGACCACCCCACCTTCAACAAGA |
| | copy 1 | SP | TCACCCCCAACCTGGCAGAGTTTGCCTTCAGCCTGTACAGGCAGCTGGCCCACCAGAGCAACAGCACCAACATCTTC |
| | | (alternate | TTCAGCCCAGTGAGCATAGCCACAGCCTTTGCCATGCTGAGCCTGGGCACCAAGGCAGACACCCATGATGAGATCCT |
| | | codon usage | GGAGGGCCTGAACTTCAACCTGACAGAGATCCCAGAGGCCCAGATCCATGAGGGCTTCCAGGAGCTGCTGAGGAC |
| | | 1) CpG | CCTGAACCAGCCAGACAGCCAGCTGCAGCTGACCACAGGCAATGGCCTGTTCCTGTCTGAGGGCCTGAAGCTGGTG |
| | | depleted | GACAAGTTCCTGGAGGATGTGAAGAAGCTGTACCACTCTGAGGCCTTCACAGTGAACTTTGGAGACACAGAGGAGG |
| | | (SEQ ID NO: | CCAAGAAGCAGATCAATGACTATGTGGAGAAGGGCACCCAGGGCAAGATAGTGGACCTGGTGAAGGAGCTGGAC |
| | | 796) | AGGGACACAGTGTTTGCCCTGGTGAACTACATCTTCTTCAAGGGCAAGTGGGAGAGGCCCTTTGAGGTGAAGGACA |
| | | | CAGAGGAGGAGGACTTCCATGTGGACCAGGTGACCACAGTGAAGGTGCCCATGATGAAGAGGCTGGGCATGTTCA |
| | | | ATATCCAGCACTGCAAGAAGCTGAGCAGCTGGGTGCTGCTGATGAAGTACCTGGGCAATGCCACAGCCATCTTCTTC |
| | | | CTGCCAGATGAGGGCAAGCTGCAGCACCTGGAGAATGAGCTGACCCATGACATCATCACCAAGTTCCTGGAGAATG |
| | | | AGGACAGGAGGTCTGCCAGCCTGCACCTGCCCAAGCTGAGCATCACAGGCACCTATGACCTGAAGTCTGTGCTGGG |
| | | | CCAGCTGGGCATCACCAAGGTGTTCAGCAATGGAGCAGACCTGTCTGGAGTGACAGAGGAGGCCCCCCTGAAGCT |
| | | | GAGCAAGGCAGTGCACAAGGCAGTGCTGACCATAGATGAGAAGGGCACAGAGGCAGCAGGAGCCATGTTCCTGG |
| | | | AGGCCATCCCCATGAGCATCCCCCCAGAGGTGAAGTTCAACAAGCCTTTTGTGTTCCTGATGATAGAGCAGAACACC |
| | | | AAGAGCCCCCTGTTCATGGGCAAGGTGGTGAACCCCACCCAGAAGTAA |
| | SERPINA1 | A1AT w/o | GAGGATCCCCAGGGAGATGCTGCCCAGAAGACAGATACATCCCACCATGATCAGGATCACCCAACCTTCAACAAGA |
| | copy 2 (rev | SP CpG | TCACCCCCAACCTGGCTGAGTTTGCCTTCAGCCTATACAGACAGCTGGCACACCAGTCCAACAGCACCAATATCTTCT |
| | comp) | depleted | TCTCCCCAGTGAGCATAGCTACAGCCTTTGCAATGCTCTCCCTGGGGACCAAGGCTGACACTCATGATGAAATCCTG |
| | | (SEQ ID NO: | GAGGGCCTGAATTTCAACCTCACAGAGATTCCAGAGGCTCAGATCCATGAAGGCTTCCAGGAACTCCTCAGAACCCT |
| | | 797) | CAACCAGCCAGACAGCCAGCTCCAGCTGACCACAGGCAATGGCCTGTTCCTCTCTGAGGGCCTGAAGCTAGTGGAT |
| | | | AAGTTTTTGGAGGATGTTAAAAAGTTGTACCACTCAGAAGCCTTCACTGTCAACTTTGGGGACACAGAAGAGGCCAA |
| | | | GAAACAGATCAATGATTATGTGGAGAAGGGTACTCAAGGGAAAATTGTGGATTTGGTCAAGGAGCTTGACAGAGA |
| | | | CACAGTTTTTGCTCTGGTGAATTACATCTTCTTTAAAGGCAAATGGGAGAGACCCTTTGAAGTCAAGGACACAGAGG |
| | | | AAGAGGACTTCCATGTGGACCAGGTGACCACAGTGAAGGTGCCTATGATGAAAAGGCTTGGTATGTTCAATATCCA |
| | | | GCACTGTAAGAAGCTGTCCAGCTGGGTGCTGCTGATGAAATACCTGGGCAATGCCACAGCCATCTTCTTCCTGCCTG |
| | | | ATGAGGGGAAACTACAGCACCTGGAAAATGAACTCACCCATGATATCATCACCAAGTTCCTGGAAAATGAAGACAG |
| | | | AAGGTCTGCCAGCTTACATTTACCCAAACTGTCCATTACTGGAACCTATGATCTGAAGTCTGTCCTGGGTCAACTGGG |
| | | | CATCACTAAGGTCTTCAGCAATGGGGCTGACCTCTCTGGGGTCACAGAGGAGGCACCCCTGAAGCTCTCCAAGGCA |
| | | | GTGCATAAGGCTGTGCTGACCATAGATGAGAAGGGCACAGAGGCTGCTGGGGCCATGTTTTTAGAGGCCATACCCA |
| | | | TGTCTATCCCCCCAGAGGTCAAGTTCAACAAACCTTTTGTATTTCTCATGATAGAGCAGAACACTAAATCACCCCTCTT |
| | | | CATGGGAAAAGTGGTGAATCCCACCCAAAAAtaa |
| 11 | Full | (SEQ ID NO: | tgtaacatcagagattttgagacacgggccagagctgcatcgcgcgtttcggtgatgacggtgaaaacctctgacacatgcagctcccggagacggtca |
| | Sequence | 1564) | cagcttgtctgtaagcggatgccgggagcagacaagcccgtcagggcgcgtcagcgggtgttggcgggtgtcggggctggcttaactatgcggcatcag |
| | | | agcagattgtactgagagtgcaccatatgcggtgtgaaataccgcacagatgcgtaaggagaaaataccgcatcaggcgccattcgccattcaggctgc |
| | | | gcaactgttgggaagggcgatcggtgcgggcctcttcgctattacgccagctggcgaaagggggatgtgctgcaaggcgattaagttgggtaacgccag |
| | | | ggttttcccagtcacgacgttgtaaaacgacggccagagaattcTTGGCCACTCCCTCTCTGCGCGCTCGCTCGCTCACTGAGGCCG |
| | | | GGCGACCAAAGGTCGCCCGACGCCCGGGCTTTGCCCGGGCGGCCTCAGTGAGCGAGCGAGCGCGCAGAGAGGGA |
| | | | GTGGCCAACTCCATCACTAGGGGTTCCTAGATCTACTAGTTGCATAATCTAAGTCAAATGGAAAGAAATATAAAAAG |
| | | | TAACATTATTACTTCTTGTTTTCTTCAGTATTTAACAATCCttttttttCTTCCCTTGCCCAGttGAGGACCCCCAGGGAGAT |
| | | | GCTGCCCAGAAGACAGACACATCTCACCATGACCAGGACCACCCCACCTTCAACAAGATCACTCCCAATCTTGCAGA |
| | | | GTTTGCATTCTCTCTCTACAGACAGCTTGCACACCAGAGCAACTCTACTAACATCTTCTTCTCTCCAGTCAGCATAGCA |
| | | | ACAGCATTTGCAATGCTCAGCCTTGGCACAAAGGCAGACACACATGATGAGATCCTTGAGGGCCTCAACTTCAATCT |
| | | | CACAGAGATCCCAGAAGCCCAGATCCATGAGGGCTTCCAGGAGCTGCTGAGAACACTCAACCAGCCTGACTCTCAG |
| | | | CTCCAGCTCACAACAGGCAATGGGCTCTTCCTCTCTGAGGGCCTCAAGCTTGTAGACAAGTTCCTGGAGGATGTCAA |
| | | | GAAGCTCTACCACTCTGAAGCCTTCACAGTCAACTTTGGAGACACAGAGGAAGCCAAGAAGCAGATCAATGACTAT |
| | | | GTAGAGAAGGGGACTCAGGGCAAGATAGTAGACCTTGTCAAGGAGCTGGACAGAGACACAGTCTTTGCACTGGTC |
| | | | AACTACATCTTCTTCAAGGGGAAGTGGGAGAGACCCTTTGAAGTCAAGGACACAGAGGAGGAGGACTTCCATGTAG |
| | | | ACCAGGTGACAACAGTCAAGGTTCCCATGATGAAGAGACTTGGCATGTTCAATATCCAGCACTGCAAGAAGCTCAG |
| | | | CTCTTGGGTCCTCCTCATGAAGTACCTTGGCAATGCAACAGCAATCTTCTTCCTTCCTGATGAGGGCAAGCTCCAGCA |
| | | | CCTTGAGAATGAGCTGACACATGACATCATCACAAAGTTCCTGGAGAATGAGGACAGAAGGTCTGCATCTCTCCACC |
| | | | TTCCAAAGCTCAGCATCACAGGCACCTATGACCTCAAGTCTGTCCTTGGCCAGCTTGGCATCACAAAGGTCTTCTCTA |
| | | | ATGGTGCAGACCTCTCTGGAGTCACAGAGGAAGCCCCCCTCAAGCTCAGCAAGGCTGTGCACAAGGCTGTGCTCAC |
| | | | AATAGATGAGAAGGGGACAGAGGCTGCAGGTGCCATGTTCCTGGAAGCCATCCCCATGAGCATCCCACCAGAAGTC |
| | | | AAGTTCAACAAGCCTTTTGTCTTCCTGATGATAGAGCAGAACACAAAGTCTCCCCTCTTCATGGGCAAGGTAGTCAAC |
| | | | CCCACTCAAAAGTAACAGACATGATAAGATACATTGATGAGTTTGGACAAACCACAACTAGAATGCAGTGAAAAAA |
| | | | ATGCTTTATTTGTGAAATTTGTGATGCTATTGCTTTATTTGTAACCATTATAAGCTGCAATAAACAAGTTAACAACAAC |
| | | | AATTGCATTCATTTTATGTTTCAGGTTCAGGGGGAGGTGTGGGAGGTTTTTTggggataccccctagagccccagctggttctttt |
| | | | ctcctcagaagCCATAGAGCCCATCTCATCCCCAGCATGCCTGCTATTGTCTTCCCAATCCTCCCCCTTGCTGTCCTGCCCC |
| | | | ACCCCACCCCCCAGAATAGAATGACACCTACTCAGACAATTCTATGCAATTTCCTCATTTTATTAGGAAAGGACAGTG |
| | | | GGAGTGGCACCTTCCAGGGTCAAGGAAGGCATGGGGGAGGGGCAAACAACAGATGGCTGGCAACTAGAAGGCAC |
| | | | AGTCTaggTTACTTCTGGGTGGGGTTCACCACCTTGCCCATGAACAGGGGGCTCTTGGTGTTCTGCTCTATCATCAGG |
| | | | AACACAAAAGGCTTGTTGAACTTCACCTCTGGGGGGATGCTCATGGGGATGGCCTCCAGGAACATGGCTCCTGCTG |
| | | | CCTCTGTGCCCTTCTCATCTATGGTCAGCACTGCCTTGTGCACTGCCTTGCTCAGCTTCAGGGGGGCCTCCTCTGTCAC |
| | | | TCCAGACAGGTCTGCTCCATTGCTGAACACCTTGGTGATGCCCAGCTGGCCCAGCACAGACTTCAGGTCATAGGTGC |
| | | | CTGTGATGCTCAGCTTGGGCAGGTGCAGGCTGGCAGACCTCCTGTCCTCATTCTCCAGGAACTTGGTGATGATGTCA |
| | | | TGGGTCAGCTCATTCTCCAGGTGCTGCAGCTTGCCCTCATCTGGCAGGAAGAAGATGGCTGTGGCATTGCCCAGGTA |
| | | | CTTCATCAGCAGCACCCAGCTGCTCAGCTTCTTGCAGTGCTGGATATTGAACATGCCCAGCCTCTTCATCATGGGCAC |
| | | | CTTCACTGTGGTCACCTGGTCCACATGGAAGTCCTCCTCCTCTGTGTCCTTCACCTCAAAGGGCCTCTCCCACTTGCCC |
| | | | TTGAAGAAGATGTAGTTCACCAGGGCAAACACTGTGTCCCTGTCCAGCTCCTTCACCAGGTCCACTATCTTGCCCTGG |
| | | | GTGCCCTTCTCCACATAGTCATTGATCTGCTTCTTGGCCTCCTCTGTGTCTCCAAAGTTCACTGTGAAGGCCTCAGAGT |
| | | | GGTACAGCTTCTTCACATCCTCCAGGAACTTGTCCACCAGCTTCAGGCCCTCAGACAGGAACAGGCCATTGCCTGTG |
| | | | GTCAGCTGCAGCTGGCTGTCTGGCTGGTTCAGGGTCCTCAGCAGCTCCTGGAAGCCCTCATGGATCTGGGCCTCTGG |
| | | | GATCTCTGTCAGGTTGAAGTTCAGGCCCTCCAGGATCTCATCATGGGTGTCTGCCTTGGTGCCCAGGCTCAGCATGG |
| | | | CAAAGGCTGTGGCTATGCTCACTGGGCTGAAGAAGATGTTGGTGCTGTTGCTCTGGTGGGCCAGCTGCCTGTACAG |
| | | | GCTGAAGGCAAACTCTGCCAGGTTGGGGGTGATCTTGTTGAAGGTGGGGTGGTCCTGGTCATGGTGGCTGGTGTCT |
| | | | GTCTTCTGGGCTGCATCTCCCTGGGGGTCCTCaaCTGGGCAAGGGAAGaaaaaaaaGGATTGTTAAATACTGAAGAAA |
| | | | ACAAGAAGTAATAATGTTACTTTTTATATTTCTTTCCATTTGACTTAGATTATGCAACTAGTAGATCTAGGAACCCCTA |
| | | | GTGATGGAGTTGGCCACTCCCTCTCTGCGCGCTCGCTCGCTCACTGAGGCCGCCCGGGCAAAGCCCGGGCGTCGGG |
| | | | CGACCTTTGGTCGCCCGGCCTCAGTGAGCGAGCGAGCGCGCAGAGAGGGAGTGGCCAAacgcgtggtgtaatcatggtcat |
| | | | agctgtttcctgtgtgaaattgttatccgctcacaattccacacaacatacgagccggaagcataaagtgtaaagcctggggtgcctaatgagtgagcta |
| | | | actcacattaattgcgttgcgctcactgcccgctttccagtcgggaaacctgtcgtgccagctgcattaatgaatcggccaacgcgcggggagaggcggtt |
| | | | tgcgtattgggcgctcttccgcttcctcgctcactgactcgctgcgctcggtcgttcggctgcggcgagcggtatcagctcactcaaaggcggtaatacggt |
| | | | tatccacagaatcaggggataacgcaggaaagaacatgtgagcaaaaggccagcaaaaggccaggaaccgtaaaaaggccgcgttgctggcgttttt |
| | | | ccataggctccgcccccctgacgagcatcacaaaaatcgacgctcaagtcagaggtggcgaaacccgacaggactataaagataccaggcgtttcccc |
| | | | ctggaagctccctcgtgcgctctcctgttccgaccctgccgcttaccggatacctgtccgcctttctcccttcgggaagcgtggcgctttctcatagctcacg |
| | | | ctgtaggtatctcagttcggtgtaggtcgttcgctccaagctgggctgtgtgcacgaaccccccgttcagcccgaccgctgcgccttatccggtaactatcg |
| | | | tcttgagtccaacccggtaagacacgacttatcgccactggcagcagccactggtaacaggattagcagagcgaggtatgtaggcggtgctacagagtt |
| | | | cttgaagtggtggcctaactacggctacactagaagaacagtatttggtatctgcgctctgctgaagccagttaccttcggaaaaagagttggtagctctt |
| | | | gatccggcaaacaaaccaccgctggtagcggtggtttttttgtttgcaagcagcagattacgcgcagaaaaaaaggatctcaagaagatcctttgatctt |
| | | | ttctacggggtctgacgctcagtggaacgaaaactcacgttaagggattttggtcatgagattatcaaaaaggatcttcacctagatccttttaaattaaa |
| | | | aatgaagttttaaatcaagcccaatctgaataatgttacaaccaattaaccaattctgattagaaaaactcatcgagcatcaaatgaaactgcaatttatt |
| | | | catatcaggattatcaataccatatttttgaaaaagccgtttctgtaatgaaggagaaaactcaccgaggcagttccataggatggcaagatcctggtat |
| | | | cggtctgcgattccgactcgtccaacatcaatacaacctattaatttcccctcgtcaaaaataaggttatcaagtgagaaatcaccatgagtgacgactga |
| | | | atccggtgagaatggcaaaagtttatgcatttctttccagacttgttcaacaggccagccattacgctcgtcatcaaaatcactcgcatcaaccaaaccgt |
| | | | tattcattcgtgattgcgcctgagcgagacgaaatacgcgatcgctgttaaaaggacaattacaaacaggaatcgaatgcaaccggcgcaggaacact |
| | | | gccagcgcatcaacaatattttcacctgaatcaggatattcttctaatacctggaatgctgtttttccggggatcgcagtggtgagtaaccatgcatcatca |
| | | | ggagtacggataaaatgcttgatggtcggaagaggcataaattccgtcagccagtttagtctgaccatctcatctgtaacatcattggcaacgctaccttt |
| | | | gccatgtttcagaaacaactctggcgcatcgggcttcccatacaagcgatagattgtcgcacctgattgcccgacattatcgcgagcccatttatacccat |
| | | | ataaatcagcatccatgttggaatttaatcgcggcctcgacgtttcccgttgaatatggctcataacaccccttgtattactgtttatgtaagcagacagttt |
| | | | tattgttcatgatgatatatttttatcttgtgcaa |
| | SERPINA1 | A1AT w/o | GAGGACCCCCAGGGAGATGCTGCCCAGAAGACAGACACATCTCACCATGACCAGGACCACCCCACCTTCAACAAGA |
| | copy 1 | SP | TCACTCCCAATCTTGCAGAGTTTGCATTCTCTCTCTACAGACAGCTTGCACACCAGAGCAACTCTACTAACATCTTCTT |
| | | (alternate | CTCTCCAGTCAGCATAGCAACAGCATTTGCAATGCTCAGCCTTGGCACAAAGGCAGACACACATGATGAGATCCTTG |
| | | codon usage | AGGGCCTCAACTTCAATCTCACAGAGATCCCAGAAGCCCAGATCCATGAGGGCTTCCAGGAGCTGCTGAGAACACT |
| | | 2) CpG | CAACCAGCCTGACTCTCAGCTCCAGCTCACAACAGGCAATGGGCTCTTCCTCTCTGAGGGCCTCAAGCTTGTAGACA |
| | | depleted | AGTTCCTGGAGGATGTCAAGAAGCTCTACCACTCTGAAGCCTTCACAGTCAACTTTGGAGACACAGAGGAAGCCAA |
| | | SEQ ID NO: | GAAGCAGATCAATGACTATGTAGAGAAGGGGACTCAGGGCAAGATAGTAGACCTTGTCAAGGAGCTGGACAGAGA |
| | | 781 | CACAGTCTTTGCACTGGTCAACTACATCTTCTTCAAGGGGAAGTGGGAGAGACCCTTTGAAGTCAAGGACACAGAG |
| | | | GAGGAGGACTTCCATGTAGACCAGGTGACAACAGTCAAGGTTCCCATGATGAAGAGACTTGGCATGTTCAATATCC |
| | | | AGCACTGCAAGAAGCTCAGCTCTTGGGTCCTCCTCATGAAGTACCTTGGCAATGCAACAGCAATCTTCTTCCTTCCTG |
| | | | ATGAGGGCAAGCTCCAGCACCTTGAGAATGAGCTGACACATGACATCATCACAAAGTTCCTGGAGAATGAGGACAG |
| | | | AAGGTCTGCATCTCTCCACCTTCCAAAGCTCAGCATCACAGGCACCTATGACCTCAAGTCTGTCCTTGGCCAGCTTGG |
| | | | CATCACAAAGGTCTTCTCTAATGGTGCAGACCTCTCTGGAGTCACAGAGGAAGCCCCCCTCAAGCTCAGCAAGGCTG |
| | | | TGCACAAGGCTGTGCTCACAATAGATGAGAAGGGGACAGAGGCTGCAGGTGCCATGTTCCTGGAAGCCATCCCCAT |
| | | | GAGCATCCCACCAGAAGTCAAGTTCAACAAGCCTTTTGTCTTCCTGATGATAGAGCAGAACACAAAGTCTCCCCTCTT |
| | | | CATGGGCAAGGTAGTCAACCCCACTCAAAAG |
| | SERPINA1 | A1AT w/o | GAGGACCCCCAGGGAGATGCAGCCCAGAAGACAGACACCAGCCACCATGACCAGGACCACCCCACCTTCAACAAGA |
| | copy 2 (rev | SP CpG | TCACCCCCAACCTGGCAGAGTTTGCCTTCAGCCTGTACAGGCAGCTGGCCCACCAGAGCAACAGCACCAACATCTTC |
| | comp) | depleted | TTCAGCCCAGTGAGCATAGCCACAGCCTTTGCCATGCTGAGCCTGGGCACCAAGGCAGACACCCATGATGAGATCCT |
| | | SEQ ID NO: | GGAGGGCCTGAACTTCAACCTGACAGAGATCCCAGAGGCCCAGATCCATGAGGGCTTCCAGGAGCTGCTGAGGAC |
| | | 782 | CCTGAACCAGCCAGACAGCCAGCTGCAGCTGACCACAGGCAATGGCCTGTTCCTGTCTGAGGGCCTGAAGCTGGTG |
| | | | GACAAGTTCCTGGAGGATGTGAAGAAGCTGTACCACTCTGAGGCCTTCACAGTGAACTTTGGAGACACAGAGGAGG |
| | | | CCAAGAAGCAGATCAATGACTATGTGGAGAAGGGCACCCAGGGCAAGATAGTGGACCTGGTGAAGGAGCTGGAC |
| | | | AGGGACACAGTGTTTGCCCTGGTGAACTACATCTTCTTCAAGGGCAAGTGGGAGAGGCCCTTTGAGGTGAAGGACA |
| | | | CAGAGGAGGAGGACTTCCATGTGGACCAGGTGACCACAGTGAAGGTGCCCATGATGAAGAGGCTGGGCATGTTCA |
| | | | ATATCCAGCACTGCAAGAAGCTGAGCAGCTGGGTGCTGCTGATGAAGTACCTGGGCAATGCCACAGCCATCTTCTTC |
| | | | CTGCCAGATGAGGGCAAGCTGCAGCACCTGGAGAATGAGCTGACCCATGACATCATCACCAAGTTCCTGGAGAATG |
| | | | AGGACAGGAGGTCTGCCAGCCTGCACCTGCCCAAGCTGAGCATCACAGGCACCTATGACCTGAAGTCTGTGCTGGG |
| | | | CCAGCTGGGCATCACCAAGGTGTTCAGCAATGGAGCAGACCTGTCTGGAGTGACAGAGGAGGCCCCCCTGAAGCT |
| | | | GAGCAAGGCAGTGCACAAGGCAGTGCTGACCATAGATGAGAAGGGCACAGAGGCAGCAGGAGCCATGTTCCTGG |
| | | | AGGCCATCCCCATGAGCATCCCCCCAGAGGTGAAGTTCAACAAGCCTTTTGTGTTCCTGATGATAGAGCAGAACACC |
| | | | AAGAGCCCCCTGTTCATGGGCAAGGTGGTGAACCCCACCCAGAAGTAA |
| 20 | A1AT w/ SP | 1380 | ATGCCGTCTTCTGTCTCGTGGGGCATCCTCCTGCTGGCAGGCCTGTGCTGCCTGGTCCCTGTCTCCCTGGCTGAGGAT |
| | | | CCCCAGGGAGATGCTGCCCAGAAGACAGATACATCCCACCATGATCAGGATCACCCAACCTTCAACAAGATCACCCC |
| | | | CAACCTGGCTGAGTTCGCCTTCAGCCTATACCGCCAGCTGGCACACCAGTCCAACAGCACCAATATCTTCTTCTCCCC |
| | | | AGTGAGCATCGCTACAGCCTTTGCAATGCTCTCCCTGGGGACCAAGGCTGACACTCACGATGAAATCCTGGAGGGC |
| | | | CTGAATTTCAACCTCACGGAGATTCCGGAGGCTCAGATCCATGAAGGCTTCCAGGAACTCCTCCGTACCCTCAACCA |
| | | | GCCAGACAGCCAGCTCCAGCTGACCACCGGCAATGGCCTGTTCCTCAGCGAGGGCCTGAAGCTAGTGGATAAGTTT |
| | | | TTGGAGGATGTTAAAAAGTTGTACCACTCAGAAGCCTTCACTGTCAACTTCGGGGACACCGAAGAGGCCAAGAAAC |
| | | | AGATCAACGATTACGTGGAGAAGGGTACTCAAGGGAAAATTGTGGATTTGGTCAAGGAGCTTGACAGAGACACAG |
| | | | TTTTTGCTCTGGTGAATTACATCTTCTTTAAAGGCAAATGGGAGAGACCCTTTGAAGTCAAGGACACCGAGGAAGAG |
| | | | GACTTCCACGTGGACCAGGTGACCACCGTGAAGGTGCCTATGATGAAGCGTTTAGGCATGTTTAACATCCAGCACTG |
| | | | TAAGAAGCTGTCCAGCTGGGTGCTGCTGATGAAATACCTGGGCAATGCCACCGCCATCTTCTTCCTGCCTGATGAGG |
| | | | GGAAACTACAGCACCTGGAAAATGAACTCACCCACGATATCATCACCAAGTTCCTGGAAAATGAAGACAGAAGGTC |
| | | | TGCCAGCTTACATTTACCCAAACTGTCCATTACTGGAACCTATGATCTGAAGAGCGTCCTGGGTCAACTGGGCATCAC |
| | | | TAAGGTCTTCAGCAATGGGGCTGACCTCTCCGGGGTCACAGAGGAGGCACCCCTGAAGCTCTCCAAGGCCGTGCAT |
| | | | AAGGCTGTGCTGACCATCGACGAGAAAGGGACTGAAGCTGCTGGGGCCATGTTTTTAGAGGCCATACCCATGTCTA |
| | | | TCCCCCCCGAGGTCAAGTTCAACAAACCCTTTGTCTTCTTAATGATTGAACAAAATACCAAGTCTCCCCTCTTCATGGG |
| | | | AAAAGTGGTGAATCCCACCCAAAAATAA |
| 21 | A1AT w/o | 1382 | ATGAAGTGGGTAACCTTTATTTCCCTTCTTTTTCTCTTTAGCTCGGCTTATTCCAGGGGTGTGTTTCGTCGAGATGCAC |
| | SP | | ttGAGGATCCCCAGGGAGATGCTGCCCAGAAGACAGATACATCCCACCATGATCAGGATCACCCAACCTTCAACAAG |
| | | | ATCACCCCCAACCTGGCTGAGTTCGCCTTCAGCCTATACCGCCAGCTGGCACACCAGTCCAACAGCACCAATATCTTC |
| | | | TTCTCCCCAGTGAGCATCGCTACAGCCTTTGCAATGCTCTCCCTGGGGACCAAGGCTGACACTCACGATGAAATCCTG |
| | | | GAGGGCCTGAATTTCAACCTCACGGAGATTCCGGAGGCTCAGATCCATGAAGGCTTCCAGGAACTCCTCCGTACCCT |
| | | | CAACCAGCCAGACAGCCAGCTCCAGCTGACCACCGGCAATGGCCTGTTCCTCAGCGAGGGCCTGAAGCTAGTGGAT |
| | | | AAGTTTTTGGAGGATGTTAAAAAGTTGTACCACTCAGAAGCCTTCACTGTCAACTTCGGGGACACCGAAGAGGCCAA |
| | | | GAAACAGATCAACGATTACGTGGAGAAGGGTACTCAAGGGAAAATTGTGGATTTGGTCAAGGAGCTTGACAGAGA |
| | | | CACAGTTTTTGCTCTGGTGAATTACATCTTCTTTAAAGGCAAATGGGAGAGACCCTTTGAAGTCAAGGACACCGAGG |
| | | | AAGAGGACTTCCACGTGGACCAGGTGACCACCGTGAAGGTGCCTATGATGAAGCGTTTAGGCATGTTTAACATCCA |
| | | | GCACTGTAAGAAGCTGTCCAGCTGGGTGCTGCTGATGAAATACCTGGGCAATGCCACCGCCATCTTCTTCCTGCCTG |
| | | | ATGAGGGGAAACTACAGCACCTGGAAAATGAACTCACCCACGATATCATCACCAAGTTCCTGGAAAATGAAGACAG |
| | | | AAGGTCTGCCAGCTTACATTTACCCAAACTGTCCATTACTGGAACCTATGATCTGAAGAGCGTCCTGGGTCAACTGG |
| | | | GCATCACTAAGGTCTTCAGCAATGGGGCTGACCTCTCCGGGGTCACAGAGGAGGCACCCCTGAAGCTCTCCAAGGC |
| | | | CGTGCATAAGGCTGTGCTGACCATCGACGAGAAAGGGACTGAAGCTGCTGGGGCCATGTTTTTAGAGGCCATACCC |
| | | | ATGTCTATCCCCCCCGAGGTCAAGTTCAACAAACCCTTTGTCTTCTTAATGATTGAACAAAATACCAAGTCTCCCCTCT |
| | | | TCATGGGAAAAGTGGTGAATCCCACCCAAAAAtaa |
| 22 | A1AT w/o | 1384 | ATGAAGTGGGTAACCTTTATTTCCCTTCTTTTTCTCTTTAGCTCGGCTTATTCCAGGGGTGTGTTTCGTCGAGATGCAC |
| | SP CpG | | ttGAGGACCCCCAGGGAGATGCAGCCCAGAAGACAGACACCAGCCACCATGACCAGGACCACCCCACCTTCAACAA |
| | depleted | | GATCACCCCCAACCTGGCAGAGTTTGCCTTCAGCCTGTACAGGCAGCTGGCCCACCAGAGCAACAGCACCAACATCT |
| | | | TCTTCAGCCCAGTGAGCATAGCCACAGCCTTTGCCATGCTGAGCCTGGGCACCAAGGCAGACACCCATGATGAGATC |
| | | | CTGGAGGGCCTGAACTTCAACCTGACAGAGATCCCAGAGGCCCAGATCCATGAGGGCTTCCAGGAGCTGCTGAGGA |
| | | | CCCTGAACCAGCCAGACAGCCAGCTGCAGCTGACCACAGGCAATGGCCTGTTCCTGTCTGAGGGCCTGAAGCTGGT |
| | | | GGACAAGTTCCTGGAGGATGTGAAGAAGCTGTACCACTCTGAGGCCTTCACAGTGAACTTTGGAGACACAGAGGAG |
| | | | GCCAAGAAGCAGATCAATGACTATGTGGAGAAGGGCACCCAGGGCAAGATAGTGGACCTGGTGAAGGAGCTGGA |
| | | | CAGGGACACAGTGTTTGCCCTGGTGAACTACATCTTCTTCAAGGGCAAGTGGGAGAGGCCCTTTGAGGTGAAGGAC |
| | | | ACAGAGGAGGAGGACTTCCATGTGGACCAGGTGACCACAGTGAAGGTGCCCATGATGAAGAGGCTGGGCATGTTC |
| | | | AATATCCAGCACTGCAAGAAGCTGAGCAGCTGGGTGCTGCTGATGAAGTACCTGGGCAATGCCACAGCCATCTTCTT |
| | | | CCTGCCAGATGAGGGCAAGCTGCAGCACCTGGAGAATGAGCTGACCCATGACATCATCACCAAGTTCCTGGAGAAT |
| | | | GAGGACAGGAGGTCTGCCAGCCTGCACCTGCCCAAGCTGAGCATCACAGGCACCTATGACCTGAAGTCTGTGCTGG |
| | | | GCCAGCTGGGCATCACCAAGGTGTTCAGCAATGGAGCAGACCTGTCTGGAGTGACAGAGGAGGCCCCCCTGAAGC |
| | | | TGAGCAAGGCAGTGCACAAGGCAGTGCTGACCATAGATGAGAAGGGCACAGAGGCAGCAGGAGCCATGTTCCTGG |
| | | | AGGCCATCCCCATGAGCATCCCCCCAGAGGTGAAGTTCAACAAGCCTTTTGTGTTCCTGATGATAGAGCAGAACACC |
| | | | AAGAGCCCCCTGTTCATGGGCAAGGTGGTGAACCCCACCCAGAAGTAA |
| 23 | A1AT w/o | 1386 | ATGAAGTGGGTAACCTTTATTTCCCTTCTTTTTCTCTTTAGCTCGGCTTATTCCAGGGGTGTGTTTCGTCGAGATGCAC |
| | SP (altern- | | ttGAGGATCCCCAGGGAGATGCTGCCCAGAAGACAGATACATCCCACCATGATCAGGATCACCCAACCTTCAACAAG |
| | ative | | ATCACCCCCAACCTGGCTGAGTTTGCCTTCAGCCTATACAGACAGCTGGCACACCAGTCCAACAGCACCAATATCTTC |
| | codon usage | | TTCTCCCCAGTGAGCATAGCTACAGCCTTTGCAATGCTCTCCCTGGGGACCAAGGCTGACACTCATGATGAAATCCTG |
| | 1) CpG | | GAGGGCCTGAATTTCAACCTCACAGAGATTCCAGAGGCTCAGATCCATGAAGGCTTCCAGGAACTCCTCAGAACCCT |
| | depleted | | CAACCAGCCAGACAGCCAGCTCCAGCTGACCACAGGCAATGGCCTGTTCCTCTCTGAGGGCCTGAAGCTAGTGGAT |
| | | | AAGTTTTTGGAGGATGTTAAAAAGTTGTACCACTCAGAAGCCTTCACTGTCAACTTTGGGGACACAGAAGAGGCCAA |
| | | | GAAACAGATCAATGATTATGTGGAGAAGGGTACTCAAGGGAAAATTGTGGATTTGGTCAAGGAGCTTGACAGAGA |
| | | | CACAGTTTTTGCTCTGGTGAATTACATCTTCTTTAAAGGCAAATGGGAGAGACCCTTTGAAGTCAAGGACACAGAGG |
| | | | AAGAGGACTTCCATGTGGACCAGGTGACCACAGTGAAGGTGCCTATGATGAAAAGGCTTGGTATGTTCAATATCCA |
| | | | GCACTGTAAGAAGCTGTCCAGCTGGGTGCTGCTGATGAAATACCTGGGCAATGCCACAGCCATCTTCTTCCTGCCTG |
| | | | ATGAGGGGAAACTACAGCACCTGGAAAATGAACTCACCCATGATATCATCACCAAGTTCCTGGAAAATGAAGACAG |
| | | | AAGGTCTGCCAGCTTACATTTACCCAAACTGTCCATTACTGGAACCTATGATCTGAAGTCTGTCCTGGGTCAACTGGG |
| | | | CATCACTAAGGTCTTCAGCAATGGGGCTGACCTCTCTGGGGTCACAGAGGAGGCACCCCTGAAGCTCTCCAAGGCA |
| | | | GTGCATAAGGCTGTGCTGACCATAGATGAGAAGGGCACAGAGGCTGCTGGGGCCATGTTTTTAGAGGCCATACCCA |
| | | | TGTCTATCCCCCCAGAGGTCAAGTTCAACAAACCTTTTGTATTTCTCATGATAGAGCAGAACACTAAATCACCCCTCTT |
| | | | CATGGGAAAAGTGGTGAATCCCACCCAAAAAtaa |
| 24 | A1AT w/o | 1388 | ATGAAGTGGGTAACCTTTATTTCCCTTCTTTTTCTCTTTAGCTCGGCTTATTCCAGGGGTGTGTTTCGTCGAGATGCAC |
| | SP altern- | | ttGAGGACCCCCAGGGAGATGCTGCCCAGAAGACAGACACATCTCACCATGACCAGGACCACCCCACCTTCAACAAG |
| | (ative | | ATCACTCCCAATCTTGCAGAGTTTGCATTCTCTCTCTACAGACAGCTTGCACACCAGAGCAACTCTACTAACATCTTCT |
| | codon usage | | TCTCTCCAGTCAGCATAGCAACAGCATTTGCAATGCTCAGCCTTGGCACAAAGGCAGACACACATGATGAGATCCTT |
| | 2) CpG | | GAGGGCCTCAACTTCAATCTCACAGAGATCCCAGAAGCCCAGATCCATGAGGGCTTCCAGGAGCTGCTGAGAACAC |
| | depleted | | TCAACCAGCCTGACTCTCAGCTCCAGCTCACAACAGGCAATGGGCTCTTCCTCTCTGAGGGCCTCAAGCTTGTAGACA |
| | | | AGTTCCTGGAGGATGTCAAGAAGCTCTACCACTCTGAAGCCTTCACAGTCAACTTTGGAGACACAGAGGAAGCCAA |
| | | | GAAGCAGATCAATGACTATGTAGAGAAGGGGACTCAGGGCAAGATAGTAGACCTTGTCAAGGAGCTGGACAGAGA |
| | | | CACAGTCTTTGCACTGGTCAACTACATCTTCTTCAAGGGGAAGTGGGAGAGACCCTTTGAAGTCAAGGACACAGAG |
| | | | GAGGAGGACTTCCATGTAGACCAGGTGACAACAGTCAAGGTTCCCATGATGAAGAGACTTGGCATGTTCAATATCC |
| | | | AGCACTGCAAGAAGCTCAGCTCTTGGGTCCTCCTCATGAAGTACCTTGGCAATGCAACAGCAATCTTCTTCCTTCCTG |
| | | | ATGAGGGCAAGCTCCAGCACCTTGAGAATGAGCTGACACATGACATCATCACAAAGTTCCTGGAGAATGAGGACAG |
| | | | AAGGTCTGCATCTCTCCACCTTCCAAAGCTCAGCATCACAGGCACCTATGACCTCAAGTCTGTCCTTGGCCAGCTTGG |
| | | | CATCACAAAGGTCTTCTCTAATGGTGCAGACCTCTCTGGAGTCACAGAGGAAGCCCCCCTCAAGCTCAGCAAGGCTG |
| | | | TGCACAAGGCTGTGCTCACAATAGATGAGAAGGGGACAGAGGCTGCAGGTGCCATGTTCCTGGAAGCCATCCCCAT |
| | | | GAGCATCCCACCAGAAGTCAAGTTCAACAAGCCTTTTGTCTTCCTGATGATAGAGCAGAACACAAAGTCTCCCCTCTT |
| | | | CATGGGCAAGGTAGTCAACCCCACTCAAAAG |
| Construct | A1AT w/o | 1390 | ATGAAGTGGGTAACCTTTATTTCCCTTCTTTTTCTCTTTAGCTCGGCTTATTCCAGGGG |
| 23 design | SP altern- | | TGTGTTTCGTCGAGATGCACttGAGGACCCCCAGGGAGATGCAGCCCAGAAGACAGAC |
| | (ative | | ACCAGCCACCATGACCAGGACCACCCCACCTTCAACAAGATCACCCCCAACCTGGCA |
| | codon usage | | GAGTTTGCCTTCAGCCTGTACAGGCAGCTGGCCCACCAGAGCAACAGCACCAACATC |
| | 1) CpG | | TTCTTCAGCCCAGTGAGCATAGCCACAGCCTTTGCCATGCTGAGCCTGGGCACCAAGG |
| | depleted | | CAGACACCCATGATGAGATCCTGGAGGGCCTGAACTTCAACCTGACAGAGATCCCAG |
| | | | AGGCCCAGATCCATGAGGGCTTCCAGGAGCTGCTGAGGACCCTGAACCAGCCAGACA |
| | | | GCCAGCTGCAGCTGACCACAGGCAATGGCCTGTTCCTGTCTGAGGGCCTGAAGCTGG |
| | | | TGGACAAGTTCCTGGAGGATGTGAAGAAGCTGTACCACTCTGAGGCCTTCACAGTGA |
| | | | ACTTTGGAGACACAGAGGAGGCCAAGAAGCAGATCAATGACTATGTGGAGAAGGGC |
| | | | ACCCAGGGCAAGATAGTGGACCTGGTGAAGGAGCTGGACAGGGACACAGTGTTTGCC |
| | | | CTGGTGAACTACATCTTCTTCAAGGGCAAGTGGGAGAGGCCCTTTGAGGTGAAGGAC |
| | | | ACAGAGGAGGAGGACTTCCATGTGGACCAGGTGACCACAGTGAAGGTGCCCATGATG |
| | | | AAGAGGCTGGGCATGTTCAATATCCAGCACTGCAAGAAGCTGAGCAGCTGGGTGCTG |
| | | | CTGATGAAGTACCTGGGCAATGCCACAGCCATCTTCTTCCTGCCAGATGAGGGCAAG |
| | | | CTGCAGCACCTGGAGAATGAGCTGACCCATGACATCATCACCAAGTTCCTGGAGAAT |
| | | | GAGGACAGGAGGTCTGCCAGCCTGCACCTGCCCAAGCTGAGCATCACAGGCACCTAT |
| | | | GACCTGAAGTCTGTGCTGGGCCAGCTGGGCATCACCAAGGTGTTCAGCAATGGAGCA |
| | | | GACCTGTCTGGAGTGACAGAGGAGGCCCCCCTGAAGCTGAGCAAGGCAGTGCACAAG |
| | | | GCAGTGCTGACCATAGATGAGAAGGGCACAGAGGCAGCAGGAGCCATGTTCCTGGA |
| | | | GGCCATCCCCATGAGCATCCCCCCAGAGGTGAAGTTCAACAAGCCTTTTGTGTTCCTG |
| | | | ATGATAGAGCAGAACACCAAGAGCCCCCTGTTCATGGGCAAGGTGGTGAACCCCACC |
| | | | CAGAAGTAA |

[0350] Universal to templates provided in SEQ ID NOs: 770, 710, 720, 730, 740, 750, 760, 780, 790, 795, and 1564 are the following sequences:

Splice acceptor Fwd:
(SEQ ID NO: 1301)
taggtcagtgaagagaagaacaaaaagcagcatattacagttagttg
tcttcatcaatctttaaatatgttgtgtggtttttctctccctgttt
ccacag
Splice acceptor Rev:
(SEQ ID NO: 1302)
ctgtggaaacagggagagaaaaaccacacaacatatttaaagattga
tgaagacaactaactgtaatatgctgctttttgttcttctcttcact
gaccta
Splice acceptor Fwd for SEQ ID NO: 1564
(SEQ ID NO: 1554)
TGCATAATCTAAGTCAAATGGAAAGAAATATAAAAAGTAACATTATT
ACTTCTTGTTTTCTTCAGTATTTAACAATCCttttttttCTTCCCTT
GCCCAG
Splice acceptor Rev for SEQ ID NO: 1564
(SEQ ID NO: 1555)
CTGGGCAAGGGAAGaaaaaaaaGGATTGTTAAATACTGAAGAAAACA
AGAAGTAATAATGTTACTTTTTATATTTCTTTCCATTTGACTTAGAT
TATGCA
Universal to all templates are the following
sequences Terminator fwd:
(SEQ ID NO: 1304)
CAGACATGATAAGATACATTGATGAGTTTGGACAAACCACAACTAGA
ATGCAGTGAAAAAAATGCTTTATTTGTGAAATTTGTGATGCTATTGC
TTTATTTGTAACCATTATAAGCTGCAATAAACAAGTTAACAACAACA
ATTGCATTCATTTTATGTTTCAGGTTCAGGGGGAGGTGTGGGAGGTT
TTTT
Terminator Rev:
(SEQ ID NO: 1305)
ggggataccccctagagccccagctggttcttttctcctcagaagCC
ATAGAGCCCATCTCATCCCCAGCATGCCTGCTATTGTCTTCCCAATC
CTCCCCCTTGCTGTCCTGCCCCACCCCACCCCCCAGAATAGAATGAC
ACCTACTCAGACAATTCTATGCAATTTCCTCATTTTATTAGGAAAGG
ACAGTGGGAGTGGCACCTTCCAGGGTCAAGGAAGGCATGGGGGAGGG
GCAAACAACAGATGGCTGGCAACTAGAAGGCACAGTCTagg

TABLE 9B

| SEQ | | |
|---|---|---|
| ID | | |
| NO | Name | Sequence |
| 1400 | wt | GAGGACCCCCAGGGCGACGCCGCCCAGAAGACCGACACCAGCCACC |
| | SERPINA1 | ACGACCAGGACCACCCCACCTTCAACAAGATCACCCCCAACCTGGCC |
| | from | GAGTTCGCCTTCAGCCTGTACAGGCAGCTGGCCCACCAGAGCAACAG |
| | Construct 1 | CACCAACATCTTCTTCAGCCCCGTGAGCATCGCCACCGCCTTCGCCAT |
| | | GCTGAGCCTGGGCACCAAGGCCGACACCCACGACGAGATCCTGGAGG |
| | | GCCTGAACTTCAACCTGACCGAGATCCCCGAGGCCCAGATCCACGAG |
| | | GGCTTCCAGGAGCTGCTGAGGACCCTGAACCAGCCCGACAGCCAGCT |
| | | GCAGCTGACCACCGGCAACGGCCTGTTCCTGAGCGAGGGCCTGAAGC |
| | | TGGTGGACAAGTTCCTGGAGGACGTGAAGAAGCTGTACCACAGCGAG |
| | | GCCTTCACCGTGAACTTCGGCGACACCGAGGAGGCCAAGAAGCAGAT |
| | | CAACGACTACGTGGAGAAGGGCACCCAGGGCAAGATCGTGGACCTG |
| | | GTGAAGGAGCTGGACAGGGACACCGTGTTCGCCCTGGTGAACTACAT |
| | | CTTCTTCAAGGGCAAGTGGGAGAGGCCCTTCGAGGTGAAGGACACCG |
| | | AGGAGGAGGACTTCCACGTGGACCAGGTGACCACCGTGAAGGTGCCC |
| | | ATGATGAAGAGGCTGGGCATGTTCAACATCCAGCACTGCAAGAAGCT |
| | | GAGCAGCTGGGTGCTGCTGATGAAGTACCTGGGCAACGCCACCGCCA |
| | | TCTTCTTCCTGCCCGACGAGGGCAAGCTGCAGCACCTGGAGAACGAG |
| | | CTGACCCACGACATCATCACCAAGTTCCTGGAGAACGAGGACAGGAG |
| | | GAGCGCCAGCCTGCACCTGCCCAAGCTGAGCATCACCGGCACCTACG |
| | | ACCTGAAGAGCGTGCTGGGCCAGCTGGGCATCACCAAGGTGTTCAGC |
| | | AACGGCGCCGACCTGAGCGGCGTGACCGAGGAGGCCCCCCTGAAGCT |
| | | GAGCAAGGCCGTGCACAAGGCCGTGCTGACCATCGACGAGAAGGGC |
| | | ACCGAGGCCGCCGGCGCCATGTTCCTGGAGGCCATCCCCATGAGCAT |
| | | CCCCCCCGAGGTGAAGTTCAACAAGCCTTTCGTGTTCCTGATGATCGA |
| | | GCAGAACACCAAGAGCCCCCTGTTCATGGGCAAGGTGGTGAACCCCA |
| | | CCCAGAAGTAA |
| 1401 | wt | ttaTTTTTGGGTGGGATTCACCACTTTTCCCATGAAGAGGGGTGATTTAG |
| | SERPINA1- | TGTTCTGCTCGATCATGAGAAATACAAAAGGTTTGTTGAACTTGACCT |
| | alternative | CGGGGGGGATAGACATGGGTATGGCCTCTAAAAACATGGCCCCAGCA |
| | codon usage | GCCTCGGTGCCCTTCTCGTCGATGGTCAGCACAGCCTTATGCACGGCC |
| | 1-from | TTGGAGAGCTTCAGGGGTGCCTCCTCTGTGACCCCGGAGAGGTCAGC |
| | Construct 1 | CCCATTGCTGAAGACCTTAGTGATGCCCAGTTGACCCAGGACGCTCTT |
| | | CAGATCATAGGTTCCAGTAATGGACAGTTTGGGTAAATGTAAGCTGG |
| | | CAGACCTTCTGTCTTCATTTTCCAGGAACTTGGTGATGATATCGTGGG |
| | | TGAGTTCATTTTCCAGGTGCTGTAGTTTCCCCTCATCAGGCAGGAAGA |
| | | AGATGGCGGTGGCATTGCCCAGGTATTTCATCAGCAGCACCCAGCTG |
| | | GACAGCTTCTTACAGTGCTGGATATTGAACATACCAAGCCTTTTCATC |
| | | ATAGGCACCTTCACGGTGGTCACCTGGTCCACGTGGAAGTCCTCTTCC |
| | | TCGGTGTCCTTGACTTCAAAGGGTCTCTCCCATTTGCCTTTAAAGAAG |
| | | ATGTAATTCACCAGAGCAAAAACTGTGTCTCTGTCAAGCTCCTTGACC |
| | | AAATCCACAATTTTCCCTTGAGTACCCTTCTCCACGTAATCGTTGATCT |
| | | GTTTCTTGGCCTCTTCGGTGTCCCCGAAGTTGACAGTGAAGGCTTCTG |
| | | AGTGGTACAACTTTTTAACATCCTCCAAAAACTTATCCACTAGCTTCA |
| | | GGCCCTCGCTGAGGAACAGGCCATTGCCGGTGGTCAGCTGGAGCTGG |
| | | CTGTCTGGCTGGTTGAGGGTACGGAGGAGTTCCTGGAAGCCTTCATG |
| | | GATCTGAGCCTCCGGAATCTCCGTGAGGTTGAAATTCAGGCCCTCCAG |
| | | GATTTCATCGTGAGTGTCAGCCTTGGTCCCCAGGGAGAGCATTGCAA |
| | | AGGCTGTAGCGATGCTCACTGGGGAGAAGAAGATATTGGTGCTGTTG |
| | | GACTGGTGTGCCAGCTGGCGGTATAGGCTGAAGGCGAACTCAGCCAG |
| | | GTTGGGGGTGATCTTGTTGAAGGTTGGGTGATCCTGATCATGGTGGGA |
| | | TGTATCTGTCTTCTGGGCAGCATCTCCCTGGGGATCCTC |
| 1402 | wt | GAGGACCCCCAGGGAGATGCAGCCCAGAAGACAGACACCAGCCACC |
| | SERPINA1 | ATGACCAGGACCACCCCACCTTCAACAAGATCACCCCCAACCTGGCA |
| | with CpG | GAGTTTGCCTTCAGCCTGTACAGGCAGCTGGCCCACCAGAGCAACAG |
| | depletion | CACCAACATCTTCTTCAGCCCAGTGAGCATAGCCACAGCCTTTGCCAT |
| | from | GCTGAGCCTGGGCACCAAGGCAGACACCCATGATGAGATCCTGGAGG |
| | Construct 7 | GCCTGAACTTCAACCTGACAGAGATCCCAGAGGCCCAGATCCATGAG |
| | | GGCTTCCAGGAGCTGCTGAGGACCCTGAACCAGCCAGACAGCCAGCT |
| | | GCAGCTGACCACAGGCAATGGCCTGTTCCTGTCTGAGGGCCTGAAGC |
| | | TGGTGGACAAGTTCCTGGAGGATGTGAAGAAGCTGTACCACTCTGAG |
| | | GCCTTCACAGTGAACTTTGGAGACACAGAGGAGGCCAAGAAGCAGAT |
| | | CAATGACTATGTGGAGAAGGGCACCCAGGGCAAGATAGTGGACCTGG |
| | | TGAAGGAGCTGGACAGGGACACAGTGTTTGCCCTGGTGAACTACATC |
| | | TTCTTCAAGGGCAAGTGGGAGAGGCCCTTTGAGGTGAAGGACACAGA |
| | | GGAGGAGGACTTCCATGTGGACCAGGTGACCACAGTGAAGGTGCCCA |
| | | TGATGAAGAGGCTGGGCATGTTCAATATCCAGCACTGCAAGAAGCTG |
| | | AGCAGCTGGGTGCTGCTGATGAAGTACCTGGGCAATGCCACAGCCAT |
| | | CTTCTTCCTGCCAGATGAGGGCAAGCTGCAGCACCTGGAGAATGAGC |
| | | TGACCCATGACATCATCACCAAGTTCCTGGAGAATGAGGACAGGAGG |
| | | TCTGCCAGCCTGCACCTGCCCAAGCTGAGCATCACAGGCACCTATGA |
| | | CCTGAAGTCTGTGCTGGGCCAGCTGGGCATCACCAAGGTGTTCAGCA |
| | | ATGGAGCAGACCTGTCTGGAGTGACAGAGGAGGCCCCCCTGAAGCTG |
| | | AGCAAGGCAGTGCACAAGGCAGTGCTGACCATAGATGAGAAGGGCA |
| | | CAGAGGCAGCAGGAGCCATGTTCCTGGAGGCCATCCCCATGAGCATC |
| | | CCCCCAGAGGTGAAGTTCAACAAGCCTTTTGTGTTCCTGATGATAGAG |
| | | CAGAACACCAAGAGCCCCCTGTTCATGGGCAAGGTGGTGAACCCCAC |
| | | CCAGAAGTAA |
| 1403 | wt | ttaTTTTTGGGTGGGATTCACCACTTTTCCCATGAAGAGGGGTGATTTAG |
| | SERPINA1- | TGTTCTGCTCTATCATGAGAAATACAAAAGGTTTGTTGAACTTGACCT |
| | alternative | CTGGGGGGATAGACATGGGTATGGCCTCTAAAAACATGGCCCCAGCA |
| | codon usage | GCCTCTGTGCCCTTCTCATCTATGGTCAGCACAGCCTTATGCACTGCC |
| | 1-CpG | TTGGAGAGCTTCAGGGGTGCCTCCTCTGTGACCCCAGAGAGGTCAGC |
| | depletion | CCCATTGCTGAAGACCTTAGTGATGCCCAGTTGACCCAGGACAGACTT |
| | from | CAGATCATAGGTTCCAGTAATGGACAGTTTGGGTAAATGTAAGCTGG |
| | Construct 7/8 | CAGACCTTCTGTCTTCATTTTCCAGGAACTTGGTGATGATATCATGGG |
| | | TGAGTTCATTTTCCAGGTGCTGTAGTTTCCCCTCATCAGGCAGGAAGA |
| | | AGATGGCTGTGGCATTGCCCAGGTATTTCATCAGCAGCACCCAGCTG |
| | | GACAGCTTCTTACAGTGCTGGATATTGAACATACCAAGCCTTTTCATC |
| | | ATAGGCACCTTCACTGTGGTCACCTGGTCCACATGGAAGTCCTCTTCC |
| | | TCTGTGTCCTTGACTTCAAAGGGTCTCTCCCATTTGCCTTTAAAGAAG |
| | | ATGTAATTCACCAGAGCAAAAACTGTGTCTCTGTCAAGCTCCTTGACC |
| | | AAATCCACAATTTTCCCTTGAGTACCCTTCTCCACATAATCATTGATCT |
| | | GTTTCTTGGCCTCTTCTGTGTCCCCAAAGTTGACAGTGAAGGCTTCTG |
| | | AGTGGTACAACTTTTTAACATCCTCCAAAAACTTATCCACTAGCTTCA |
| | | GGCCCTCAGAGAGGAACAGGCCATTGCCTGTGGTCAGCTGGAGCTGG |
| | | CTGTCTGGCTGGTTGAGGGTTCTGAGGAGTTCCTGGAAGCCTTCATGG |
| | | ATCTGAGCCTCTGGAATCTCTGTGAGGTTGAAATTCAGGCCCTCCAGG |
| | | ATTTCATCATGAGTGTCAGCCTTGGTCCCCAGGGAGAGCATTGCAAA |
| | | GGCTGTAGCTATGCTCACTGGGGAGAAGAAGATATTGGTGCTGTTGG |
| | | ACTGGTGTGCCAGCTGTCTGTATAGGCTGAAGGCAAACTCAGCCAGG |
| | | TTGGGGGTGATCTTGTTGAAGGTTGGGTGATCCTGATCATGGTGGGAT |
| | | GTATCTGTCTTCTGGGCAGCATCTCCCTGGGGATCCTC |
| 1404 | wt | GAGGACCCCCAGGGAGATGCTGCCCAGAAGACAGACACATCTCACCA |
| | SERPINA1- | TGACCAGGACCACCCCACCTTCAACAAGATCACTCCCAATCTTGCAG |
| | alternative | AGTTTGCATTCTCTCTCTACAGACAGCTTGCACACCAGAGCAACTCTA |
| | codon usage | CTAACATCTTCTTCTCTCCAGTCAGCATAGCAACAGCATTTGCAATGC |
| | 2-CpG | TCAGCCTTGGCACAAAGGCAGACACACATGATGAGATCCTTGAGGGC |
| | depletion | CTCAACTTCAATCTCACAGAGATCCCAGAAGCCCAGATCCATGAGGG |
| | from | CTTCCAGGAGCTGCTGAGAACACTCAACCAGCCTGACTCTCAGCTCCA |
| | Construct 8 | GCTCACAACAGGCAATGGGCTCTTCCTCTCTGAGGGCCTCAAGCTTGT |
| | | AGACAAGTTCCTGGAGGATGTCAAGAAGCTCTACCACTCTGAAGCCT |
| | | TCACAGTCAACTTTGGAGACACAGAGGAAGCCAAGAAGCAGATCAAT |
| | | GACTATGTAGAGAAGGGGACTCAGGGCAAGATAGTAGACCTTGTCAA |
| | | GGAGCTGGACAGAGACACAGTCTTTGCACTGGTCAACTACATCTTCTT |
| | | CAAGGGGAAGTGGGAGAGACCCTTTGAAGTCAAGGACACAGAGGAG |
| | | GAGGACTTCCATGTAGACCAGGTGACAACAGTCAAGGTTCCCATGAT |
| | | GAAGAGACTTGGCATGTTCAATATCCAGCACTGCAAGAAGCTCAGCT |
| | | CTTGGGTCCTCCTCATGAAGTACCTTGGCAATGCAACAGCAATCTTCT |
| | | TCCTTCCTGATGAGGGCAAGCTCCAGCACCTTGAGAATGAGCTGACA |
| | | CATGACATCATCACAAAGTTCCTGGAGAATGAGGACAGAAGGTCTGC |
| | | ATCTCTCCACCTTCCAAAGCTCAGCATCACAGGCACCTATGACCTCAA |
| | | GTCTGTCCTTGGCCAGCTTGGCATCACAAAGGTCTTCTCTAATGGTGC |
| | | AGACCTCTCTGGAGTCACAGAGGAAGCCCCCCTCAAGCTCAGCAAGG |
| | | CTGTGCACAAGGCTGTGCTCACAATAGATGAGAAGGGGACAGAGGCT |
| | | GCAGGTGCCATGTTCCTGGAAGCCATCCCCATGAGCATCCCACCAGA |
| | | AGTCAAGTTCAACAAGCCTTTTGTCTTCCTGATGATAGAGCAGAACAC |
| | | AAAGTCTCCCCTCTTCATGGGCAAGGTAGTCAACCCCACTCAAAAG |
| 1405 | WT SERPINA1 | ATGCCGTCTTCTGTCTCGTGGGGCATCCTCCTGCTGGCAGGCCTGTGC |
| | ORF | TGCCTGGTCCCTGTCTCCCTGGCTGAGGATCCCCAGGGAGATGCTGCC |
| | | CAGAAGACAGATACATCCCACCATGATCAGGATCACCCAACCTTCAA |
| | | CAAGATCACCCCCAACCTGGCTGAGTTCGCCTTCAGCCTATACCGCCA |
| | | GCTGGCACACCAGTCCAACAGCACCAATATCTTCTTCTCCCCAGTGAG |
| | | CATCGCTACAGCCTTTGCAATGCTCTCCCTGGGGACCAAGGCTGACAC |
| | | TCACGATGAAATCCTGGAGGGCCTGAATTTCAACCTCACGGAGATTC |
| | | CGGAGGCTCAGATCCATGAAGGCTTCCAGGAACTCCTCCGTACCCTC |
| | | AACCAGCCAGACAGCCAGCTCCAGCTGACCACCGGCAATGGCCTGTT |
| | | CCTCAGCGAGGGCCTGAAGCTAGTGGATAAGTTTTTGGAGGATGTTA |
| | | AAAAGTTGTACCACTCAGAAGCCTTCACTGTCAACTTCGGGGACACC |
| | | GAAGAGGCCAAGAAACAGATCAACGATTACGTGGAGAAGGGTACTC |
| | | AAGGGAAAATTGTGGATTTGGTCAAGGAGCTTGACAGAGACACAGTT |
| | | TTTGCTCTGGTGAATTACATCTTCTTTAAAGGCAAATGGGAGAGACCC |
| | | TTTGAAGTCAAGGACACCGAGGAAGAGGACTTCCACGTGGACCAGGT |
| | | GACCACCGTGAAGGTGCCTATGATGAAGCGTTTAGGCATGTTTAACA |
| | | TCCAGCACTGTAAGAAGCTGTCCAGCTGGGTGCTGCTGATGAAATAC |
| | | CTGGGCAATGCCACCGCCATCTTCTTCCTGCCTGATGAGGGGAAACTA |
| | | CAGCACCTGGAAAATGAACTCACCCACGATATCATCACCAAGTTCCT |
| | | GGAAAATGAAGACAGAAGGTCTGCCAGCTTACATTTACCCAAACTGT |
| | | CCATTACTGGAACCTATGATCTGAAGAGCGTCCTGGGTCAACTGGGC |
| | | ATCACTAAGGTCTTCAGCAATGGGGCTGACCTCTCCGGGGTCACAGA |
| | | GGAGGCACCCCTGAAGCTCTCCAAGGCCGTGCATAAGGCTGTGCTGA |
| | | CCATCGACGAGAAAGGGACTGAAGCTGCTGGGGCCATGTTTTTAGAG |
| | | GCCATACCCATGTCTATCCCCCCCGAGGTCAAGTTCAACAAACCCTTT |
| | | GTCTTCTTAATGATTGAACAAAATACCAAGTCTCCCCTCTTCATGGGA |
| | | AAAGTGGTGAATCCCACCCAAAAATAA |
| 1406 | SERPINA1 WT | MPSSVSWGILLLAGLCCLVPVSLAEDPQGDAAQKTDTSHHDQDHPTFNK |
| | amino acid | ITPNLAEFAFSLYRQLAHQSNSTNIFFSPVSIATAFAMLSLGTKADTHDEIL |
| | sequence | EGLNFNLTEIPEAQIHEGFQELLRTLNQPDSQLQLTTGNGLFLSEGLKLVD |
| | | KFLEDVKKLYHSEAFTVNFGDTEEAKKQINDYVEKGTQGKIVDLVKELD |
| | | RDTVFALVNYIFFKGKWERPFEVKDTEEEDFHVDQVTTVKVPMMKRLG |
| | | MFNIQHCKKLSSWVLLMKYLGNATAIFFLPDEGKLQHLENELTHDIITKF |
| | | LENEDRRSASLHLPKLSITGTYDLKSVLGQLGITKVFSNGADLSGVTEEAP |
| | | LKLSKAVHKAVLTIDEKGTEAAGAMFLEAIPMSIPPEVKFNKPFVFLMIE |
| | | QNTKSPLFMGKVVNPTQK |
| 1407 | hSERPINA1 | MKWVTFISLLFLFSSAYSRGVFRRDALEDPQGDAAQKTDTSHHDQDHPT |
| | with hAlbumin | FNKITPNLAEFAFSLYRQLAHQSNSTNIFFSPVSIATAFAMLSLGTKADTH |
| | signal peptide | DEILEGLNFNLTEIPEAQIHEGFQELLRTLNQPDSQLQLTTGNGLFLSEGL |
| | encoded | KLVDKFLEDVKKLYHSEAFTVNFGDTEEAKKQINDYVEKGTQGKIVDLV |
| | insertion | KELDRDTVFALVNYIFFKGKWERPFEVKDTEEEDFHVDQVTTVKVPMM |
| | product | KRLGMFNIQHCKKLSSWVLLMKYLGNATAIFFLPDEGKLQHLENELTHD |
| | | IITKFLENEDRRSASLHLPKLSITGTYDLKSVLGQLGITKVFSNGADLSGV |
| | | TEEAPLKLSKAVHKAVLTIDEKGTEAAGAMFLEAIPMSIPPEVKFNKPFV |
| | | FLMIEQNTKSPLFMGKVVNPTQK |
| 1408 | hSERPINA1 | DALEDPQGDAAQKTDTSHHDQDHPTFNKITPNLAEFAFSLYRQLAHQSN |
| | with hAlbumin | STNIFFSPVSIATAFAMLSLGTKADTHDEILEGLNFNLTEIPEAQIHEGFQE |
| | signal peptide | LLRTLNQPDSQLQLTTGNGLFLSEGLKLVDKFLEDVKKLYHSEAFTVNF |
| | encoded | GDTEEAKKQINDYVEKGTQGKIVDLVKELDRDTVFALVNYIFFKGKWER |
| | insertion product | PFEVKDTEEEDFHVDQVTTVKVPMMKRLGMFNIQHCKKLSSWVLLMKY |
| | after signal | LGNATAIFFLPDEGKLQHLENELTHDIITKFLENEDRRSASLHLPKLSITGT |
| | peptide cleavage | YDLKSVLGQLGITKVFSNGADLSGVTEEAPLKLSKAVHKAVLTIDEKGTE |
| | | AAGAMFLEAIPMSIPPEVKFNKPFVFLMIEQNTKSPLFMGKVVNPTQK |
| 1409 | native | MPSSVSWGILLLAGLCCLVPVSLAEDPQGDAAQKTDTSHHDQDHPTFNK |
| | hSERPINA1 seq, | ITPNLAEFAFSLYRQLAHQSNSTNIFFSPVSIATAFAMLSLGTKADTHDEIL |
| | with SERPINA1 | EGLNFNLTEIPEAQIHEGFQELLRTLNQPDSQLQLTTGNGLFLSEGLKLVD |
| | signal peptide | KFLEDVKKLYHSEAFTVNFGDTEEAKKQINDYVEKGTQGKIVDLVKELD |
| | | RDTVFALVNYIFFKGKWERPFEVKDTEEEDFHVDQVTTVKVPMMKRLG |
| | | MFNIQHCKKLSSWVLLMKYLGNATAIFFLPDEGKLQHLENELTHDIITKF |
| | | LENEDRRSASLHLPKLSITGTYDLKSVLGQLGITKVFSNGADLSGVTEEAP |
| | | LKLSKAVHKAVLTIDEKGTEAAGAMFLEAIPMSIPPEVKFNKPFVFLMIE |
| | | QNTKSPLFMGKVVNPTQK |
| 1410 | native | EDPQGDAAQKTDTSHHDQDHPTFNKITPNLAEFAFSLYRQLAHQSNSTNI |
| | hSERPINA1 seq, | FFSPVSIATAFAMLSLGTKADTHDEILEGLNFNLTEIPEAQIHEGFQELLRT |
| | with SERPINA1 | LNQPDSQLQLTTGNGLFLSEGLKLVDKFLEDVKKLYHSEAFTVNFGDTE |
| | signal peptide | EAKKQINDYVEKGTQGKIVDLVKELDRDTVFALVNYIFFKGKWERPFEV |
| | after signal | KDTEEEDFHVDQVTTVKVPMMKRLGMFNIQHCKKLSSWVLLMKYLGN |
| | peptide cleavage | ATAIFFLPDEGKLQHLENELTHDIITKFLENEDRRSASLHLPKLSITGTYDL |
| | | KSVLGQLGITKVFSNGADLSGVTEEAPLKLSKAVHKAVLTIDEKGTEAA |
| | | GAMFLEAIPMSIPPEVKFNKPFVFLMIEQNTKSPLFMGKVVNPTQK |
| 857 | Recombinant | MDKKYSIGLDIGTNSVGWAVITDEYKVPSKKFKVLGNTDRHSIKKNLIG |
| | Cas9-NLS amino | ALLFDSGETAEATRLKRTARRRYTRRKNRICYLQEIFSNEMAKVDDSFFH |
| | acid sequence | RLEESFLVEEDKKHERHPIFGNIVDEVAYHEKYPTIYHLRKKLVDSTDKA |
| | | DLRLIYLALAHMIKFRGHFLIEGDLNPDNSDVDKLFQLVQTYNQLFEENP |
| | | INASGVDAKAILSARLSKSRRLENLIAQLPGEKKNGLFGNLIALSLGLTPN |
| | | FKSNFDLAEDAKLQLSKDTYDDDLDNLLAQIGDQYADLFLAAKNLSDAI |
| | | LLSDILRVNTEITKAPLSASMIKRYDEHHQDLTLLKALVRQQLPEKYKEIF |
| | | FDQSKNGYAGYIDGGASQEEFYKFIKPILEKMDGTEELLVKLNREDLLRK |
| | | QRTFDNGSIPHQIHLGELHAILRRQEDFYPFLKDNREKIEKILTFRIPYYVG |
| | | PLARGNSRFAWMTRKSEETITPWNFEEVVDKGASAQSFIERMTNFDKNL |
| | | PNEKVLPKHSLLYEYFTVYNELTKVKYVTEGMRKPAFLSGEQKKAIVDL |
| | | LFKTNRKVTVKQLKEDYFKKIECFDSVEISGVEDRFNASLGTYHDLLKIIK |
| | | DKDFLDNEENEDILEDIVLTLTLFEDREMIEERLKTYAHLFDDKVMKQLK |
| | | RRRYTGWGRLSRKLINGIRDKQSGKTILDFLKSDGFANRNFMQLIHDDSL |
| | | TFKEDIQKAQVSGQGDSLHEHIANLAGSPAIKKGILQTVKVVDELVKVM |
| | | GRHKPENIVIEMARENQTTQKGQKNSRERMKRIEEGIKELGSQILKEHPV |
| | | ENTQLQNEKLYLYYLQNGRDMYVDQELDINRLSDYDVDHIVPQSFLKD |
| | | DSIDNKVLTRSDKNRGKSDNVPSEEVVKKMKNYWRQLLNAKLITQRKF |
| | | DNLTKAERGGLSELDKAGFIKRQLVETRQITKHVAQILDSRMNTKYDEN |
| | | DKLIREVKVITLKSKLVSDFRKDFQFYKVREINNYHHAHDAYLNAVVGT |
| | | ALIKKYPKLESEFVYGDYKVYDVRKMIAKSEQEIGKATAKYFFYSNIMN |
| | | FFKTEITLANGEIRKRPLIETNGETGEIVWDKGRDFATVRKVLSMPQVNIV |
| | | KKTEVQTGGFSKESILPKRNSDKLIARKKDWDPKKYGGFDSPTVAYSVL |
| | | VVAKVEKGKSKKLKSVKELLGITIMERSSFEKNPIDFLEAKGYKEVKKDL |
| | | IIKLPKYSLFELENGRKRMLASAGELQKGNELALPSKYVNFLYLASHYEK |
| | | LKGSPEDNEQKQLFVEQHKHYLDEIIEQISEFSKRVILADANLDKVLSAY |
| | | NKHRDKPIREQAENIIHLFTLTNLGAPAAFKYFDTTIDRKRYTSTKEVLDA |
| | | TLIHQSITGLYETRIDLSQLGGDGGGSPKKKRKV |
| 858 | ORF encoding | ATGGACAAGAAGTACAGCATCGGACTGGACATCGGAACAAACAGCG |
| | Sp. Cas9 | TCGGATGGGCAGTCATCACAGACGAATACAAGGTCCCGAGCAAGAAG |
| | | TTCAAGGTCCTGGGAAACACAGACAGACACAGCATCAAGAAGAACCT |
| | | GATCGGAGCACTGCTGTTCGACAGCGGAGAAACAGCAGAAGCAACA |
| | | AGACTGAAGAGAACAGCAAGAAGAAGATACACAAGAAGAAAGAACA |
| | | GAATCTGCTACCTGCAGGAAATCTTCAGCAACGAAATGGCAAAGGTC |
| | | GACGACAGCTTCTTCCACAGACTGGAAGAAAGCTTCCTGGTCGAAGA |
| | | AGACAAGAAGCACGAAAGACACCCGATCTTCGGAAACATCGTCGACG |
| | | AAGTCGCATACCACGAAAAGTACCCGACAATCTACCACCTGAGAAAG |
| | | AAGCTGGTCGACAGCACAGACAAGGCAGACCTGAGACTGATCTACCT |
| | | GGCACTGGCACACATGATCAAGTTCAGAGGACACTTCCTGATCGAAG |
| | | GAGACCTGAACCCGGACAACAGCGACGTCGACAAGCTGTTCATCCAG |
| | | CTGGTCCAGACATACAACCAGCTGTTCGAAGAAAACCCGATCAACGC |
| | | AAGCGGAGTCGACGCAAAGGCAATCCTGAGCGCAAGACTGAGCAAG |
| | | AGCAGAAGACTGGAAAACCTGATCGCACAGCTGCCGGGAGAAAAGA |
| | | AGAACGGACTGTTCGGAAACCTGATCGCACTGAGCCTGGGACTGACA |
| | | CCGAACTTCAAGAGCAACTTCGACCTGGCAGAAGACGCAAAGCTGCA |
| | | GCTGAGCAAGGACACATACGACGACGACCTGGACAACCTGCTGGCAC |
| | | AGATCGGAGACCAGTACGCAGACCTGTTCCTGGCAGCAAAGAACCTG |
| | | AGCGACGCAATCCTGCTGAGCGACATCCTGAGAGTCAACACAGAAAT |
| | | CACAAAGGCACCGCTGAGCGCAAGCATGATCAAGAGATACGACGAA |
| | | CACCACCAGGACCTGACACTGCTGAAGGCACTGGTCAGACAGCAGCT |
| | | GCCGGAAAAGTACAAGGAAATCTTCTTCGACCAGAGCAAGAACGGAT |
| | | ACGCAGGATACATCGACGGAGGAGCAAGCCAGGAAGAATTCTACAA |
| | | GTTCATCAAGCCGATCCTGGAAAAGATGGACGGAACAGAAGAACTGC |
| | | TGGTCAAGCTGAACAGAGAAGACCTGCTGAGAAAGCAGAGAACATTC |
| | | GACAACGGAAGCATCCCGCACCAGATCCACCTGGGAGAACTGCACGC |
| | | AATCCTGAGAAGACAGGAAGACTTCTACCCGTTCCTGAAGGACAACA |
| | | GAGAAAAGATCGAAAAGATCCTGACATTCAGAATCCCGTACTACGTC |
| | | GGACCGCTGGCAAGAGGAAACAGCAGATTCGCATGGATGACAAGAA |
| | | AGAGCGAAGAAACAATCACACCGTGGAACTTCGAAGAAGTCGTCGAC |
| | | AAGGGAGCAAGCGCACAGAGCTTCATCGAAAGAATGACAAACTTCG |
| | | ACAAGAACCTGCCGAACGAAAAGGTCCTGCCGAAGCACAGCCTGCTG |
| | | TACGAATACTTCACAGTCTACAACGAACTGACAAAGGTCAAGTACGT |
| | | CACAGAAGGAATGAGAAAGCCGGCATTCCTGAGCGGAGAACAGAAG |
| | | AAGGCAATCGTCGACCTGCTGTTCAAGACAAACAGAAAGGTCACAGT |
| | | CAAGCAGCTGAAGGAAGACTACTTCAAGAAGATCGAATGCTTCGACA |
| | | GCGTCGAAATCAGCGGAGTCGAAGACAGATTCAACGCAAGCCTGGGA |
| | | ACATACCACGACCTGCTGAAGATCATCAAGGACAAGGACTTCCTGGA |
| | | CAACGAAGAAAACGAAGACATCCTGGAAGACATCGTCCTGACACTGA |
| | | CACTGTTCGAAGACAGAGAAATGATCGAAGAAAGACTGAAGACATA |
| | | CGCACACCTGTTCGACGACAAGGTCATGAAGCAGCTGAAGAGAAGAA |
| | | GATACACAGGATGGGGAAGACTGAGCAGAAAGCTGATCAACGGAAT |
| | | CAGAGACAAGCAGAGCGGAAAGACAATCCTGGACTTCCTGAAGAGC |
| | | GACGGATTCGCAAACAGAAACTTCATGCAGCTGATCCACGACGACAG |
| | | CCTGACATTCAAGGAAGACATCCAGAAGGCACAGGTCAGCGGACAG |
| | | GGAGACAGCCTGCACGAACACATCGCAAACCTGGCAGGAAGCCCGG |
| | | CAATCAAGAAGGGAATCCTGCAGACAGTCAAGGTCGTCGACGAACTG |
| | | GTCAAGGTCATGGGAAGACACAAGCCGGAAAACATCGTCATCGAAAT |
| | | GGCAAGAGAAAACCAGACAACACAGAAGGGACAGAAGAACAGCAG |
| | | AGAAAGAATGAAGAGAATCGAAGAAGGAATCAAGGAACTGGGAAGC |
| | | CAGATCCTGAAGGAACACCCGGTCGAAAACACACAGCTGCAGAACG |
| | | AAAAGCTGTACCTGTACTACCTGCAGAACGGAAGAGACATGTACGTC |
| | | GACCAGGAACTGGACATCAACAGACTGAGCGACTACGACGTCGACCA |
| | | CATCGTCCCGCAGAGCTTCCTGAAGGACGACAGCATCGACAACAAGG |
| | | TCCTGACAAGAAGCGACAAGAACAGAGGAAAGAGCGACAACGTCCC |
| | | GAGCGAAGAAGTCGTCAAGAAGATGAAGAACTACTGGAGACAGCTG |
| | | CTGAACGCAAAGCTGATCACACAGAGAAAGTTCGACAACCTGACAAA |
| | | GGCAGAGAGAGGAGGACTGAGCGAACTGGACAAGGCAGGATTCATC |
| | | AAGAGACAGCTGGTCGAAACAAGACAGATCACAAAGCACGTCGCAC |
| | | AGATCCTGGACAGCAGAATGAACACAAAGTACGACGAAAACGACAA |
| | | GCTGATCAGAGAAGTCAAGGTCATCACACTGAAGAGCAAGCTGGTCA |
| | | GCGACTTCAGAAAGGACTTCCAGTTCTACAAGGTCAGAGAAATCAAC |
| | | AACTACCACCACGCACACGACGCATACCTGAACGCAGTCGTCGGAAC |
| | | AGCACTGATCAAGAAGTACCCGAAGCTGGAAAGCGAATTCGTCTACG |
| | | GAGACTACAAGGTCTACGACGTCAGAAAGATGATCGCAAAGAGCGA |
| | | ACAGGAAATCGGAAAGGCAACAGCAAAGTACTTCTTCTACAGCAACA |
| | | TCATGAACTTCTTCAAGACAGAAATCACACTGGCAAACGGAGAAATC |
| | | AGAAAGAGACCGCTGATCGAAACAAACGGAGAAACAGGAGAAATCG |
| | | TCTGGGACAAGGGAAGAGACTTCGCAACAGTCAGAAAGGTCCTGAGC |
| | | ATGCCGCAGGTCAACATCGTCAAGAAGACAGAAGTCCAGACAGGAG |
| | | GATTCAGCAAGGAAAGCATCCTGCCGAAGAGAAACAGCGACAAGCT |
| | | GATCGCAAGAAAGAAGGACTGGGACCCGAAGAAGTACGGAGGATTC |
| | | GACAGCCCGACAGTCGCATACAGCGTCCTGGTCGTCGCAAAGGTCGA |
| | | AAAGGGAAAGAGCAAGAAGCTGAAGAGCGTCAAGGAACTGCTGGGA |
| | | ATCACAATCATGGAAAGAAGCAGCTTCGAAAAGAACCCGATCGACTT |
| | | CCTGGAAGCAAAGGGATACAAGGAAGTCAAGAAGGACCTGATCATC |
| | | AAGCTGCCGAAGTACAGCCTGTTCGAACTGGAAAACGGAAGAAAGA |
| | | GAATGCTGGCAAGCGCAGGAGAACTGCAGAAGGGAAACGAACTGGC |
| | | ACTGCCGAGCAAGTACGTCAACTTCCTGTACCTGGCAAGCCACTACG |
| | | AAAAGCTGAAGGGAAGCCCGGAAGACAACGAACAGAAGCAGCTGTT |
| | | CGTCGAACAGCACAAGCACTACCTGGACGAAATCATCGAACAGATCA |
| | | GCGAATTCAGCAAGAGAGTCATCCTGGCAGACGCAAACCTGGACAAG |
| | | GTCCTGAGCGCATACAACAAGCACAGAGACAAGCCGATCAGAGAAC |
| | | AGGCAGAAAACATCATCCACCTGTTCACACTGACAAACCTGGGAGCA |
| | | CCGGCAGCATTCAAGTACTTCGACACAACAATCGACAGAAAGAGATA |
| | | CACAAGCACAAAGGAAGTCCTGGACGCAACACTGATCCACCAGAGCA |
| | | TCACAGGACTGTACGAAACAAGAATCGACCTGAGCCAGCTGGGAGGA |
| | | GACGGAGGAGGAAGCCCGAAGAAGAAGAGAAAGGTCTAG |
| 859 | ORF encoding | ATGGACAAGAAGTACTCCATCGGCCTGGACATCGGCACCAACTCCGT |
| | Sp. Cas9 | GGGCTGGGCCGTGATCACCGACGAGTACAAGGTGCCCTCCAAGAAGT |
| | | TCAAGGTGCTGGGCAACACCGACCGGCACTCCATCAAGAAGAACCTG |
| | | ATCGGCGCCCTGCTGTTCGACTCCGGCGAGACCGCCGAGGCCACCCG |
| | | GCTGAAGCGGACCGCCCGGCGGCGGTACACCCGGCGGAAGAACCGG |
| | | ATCTGCTACCTGCAGGAGATCTTCTCCAACGAGATGGCCAAGGTGGA |
| | | CGACTCCTTCTTCCACCGGCTGGAGGAGTCCTTCCTGGTGGAGGAGGA |
| | | CAAGAAGCACGAGCGGCACCCCATCTTCGGCAACATCGTGGACGAGG |
| | | TGGCCTACCACGAGAAGTACCCCACCATCTACCACCTGCGGAAGAAG |
| | | CTGGTGGACTCCACCGACAAGGCCGACCTGCGGCTGATCTACCTGGC |
| | | CCTGGCCCACATGATCAAGTTCCGGGGCCACTTCCTGATCGAGGGCG |
| | | ACCTGAACCCCGACAACTCCGACGTGGACAAGCTGTTCATCCAGCTG |
| | | GTGCAGACCTACAACCAGCTGTTCGAGGAGAACCCCATCAACGCCTC |
| | | CGGCGTGGACGCCAAGGCCATCCTGTCCGCCCGGCTGTCCAAGTCCC |
| | | GGCGGCTGGAGAACCTGATCGCCCAGCTGCCCGGCGAGAAGAAGAA |
| | | CGGCCTGTTCGGCAACCTGATCGCCCTGTCCCTGGGCCTGACCCCCAA |
| | | CTTCAAGTCCAACTTCGACCTGGCCGAGGACGCCAAGCTGCAGCTGT |
| | | CCAAGGACACCTACGACGACGACCTGGACAACCTGCTGGCCCAGATC |
| | | GGCGACCAGTACGCCGACCTGTTCCTGGCCGCCAAGAACCTGTCCGA |
| | | CGCCATCCTGCTGTCCGACATCCTGCGGGTGAACACCGAGATCACCA |
| | | AGGCCCCCCTGTCCGCCTCCATGATCAAGCGGTACGACGAGCACCAC |
| | | CAGGACCTGACCCTGCTGAAGGCCCTGGTGCGGCAGCAGCTGCCCGA |
| | | GAAGTACAAGGAGATCTTCTTCGACCAGTCCAAGAACGGCTACGCCG |
| | | GCTACATCGACGGCGGCGCCTCCCAGGAGGAGTTCTACAAGTTCATC |
| | | AAGCCCATCCTGGAGAAGATGGACGGCACCGAGGAGCTGCTGGTGAA |
| | | GCTGAACCGGGAGGACCTGCTGCGGAAGCAGCGGACCTTCGACAACG |
| | | GCTCCATCCCCCACCAGATCCACCTGGGCGAGCTGCACGCCATCCTGC |
| | | GGCGGCAGGAGGACTTCTACCCCTTCCTGAAGGACAACCGGGAGAAG |
| | | ATCGAGAAGATCCTGACCTTCCGGATCCCCTACTACGTGGGCCCCCTG |
| | | GCCCGGGGCAACTCCCGGTTCGCCTGGATGACCCGGAAGTCCGAGGA |
| | | GACCATCACCCCCTGGAACTTCGAGGAGGTGGTGGACAAGGGCGCCT |
| | | CCGCCCAGTCCTTCATCGAGCGGATGACCAACTTCGACAAGAACCTG |
| | | CCCAACGAGAAGGTGCTGCCCAAGCACTCCCTGCTGTACGAGTACTT |
| | | CACCGTGTACAACGAGCTGACCAAGGTGAAGTACGTGACCGAGGGCA |
| | | TGCGGAAGCCCGCCTTCCTGTCCGGCGAGCAGAAGAAGGCCATCGTG |
| | | GACCTGCTGTTCAAGACCAACCGGAAGGTGACCGTGAAGCAGCTGAA |
| | | GGAGGACTACTTCAAGAAGATCGAGTGCTTCGACTCCGTGGAGATCT |
| | | CCGGCGTGGAGGACCGGTTCAACGCCTCCCTGGGCACCTACCACGAC |
| | | CTGCTGAAGATCATCAAGGACAAGGACTTCCTGGACAACGAGGAGAA |
| | | CGAGGACATCCTGGAGGACATCGTGCTGACCCTGACCCTGTTCGAGG |
| | | ACCGGGAGATGATCGAGGAGCGGCTGAAGACCTACGCCCACCTGTTC |
| | | GACGACAAGGTGATGAAGCAGCTGAAGCGGCGGCGGTACACCGGCT |
| | | GGGGCCGGCTGTCCCGGAAGCTGATCAACGGCATCCGGGACAAGCAG |
| | | TCCGGCAAGACCATCCTGGACTTCCTGAAGTCCGACGGCTTCGCCAAC |
| | | CGGAACTTCATGCAGCTGATCCACGACGACTCCCTGACCTTCAAGGA |
| | | GGACATCCAGAAGGCCCAGGTGTCCGGCCAGGGCGACTCCCTGCACG |
| | | AGCACATCGCCAACCTGGCCGGCTCCCCCGCCATCAAGAAGGGCATC |
| | | CTGCAGACCGTGAAGGTGGTGGACGAGCTGGTGAAGGTGATGGGCCG |
| | | GCACAAGCCCGAGAACATCGTGATCGAGATGGCCCGGGAGAACCAG |
| | | ACCACCCAGAAGGGCCAGAAGAACTCCCGGGAGCGGATGAAGCGGA |
| | | TCGAGGAGGGCATCAAGGAGCTGGGCTCCCAGATCCTGAAGGAGCAC |
| | | CCCGTGGAGAACACCCAGCTGCAGAACGAGAAGCTGTACCTGTACTA |
| | | CCTGCAGAACGGCCGGGACATGTACGTGGACCAGGAGCTGGACATCA |
| | | ACCGGCTGTCCGACTACGACGTGGACCACATCGTGCCCCAGTCCTTCC |
| | | TGAAGGACGACTCCATCGACAACAAGGTGCTGACCCGGTCCGACAAG |
| | | AACCGGGGCAAGTCCGACAACGTGCCCTCCGAGGAGGTGGTGAAGA |
| | | AGATGAAGAACTACTGGCGGCAGCTGCTGAACGCCAAGCTGATCACC |
| | | CAGCGGAAGTTCGACAACCTGACCAAGGCCGAGCGGGGCGGCCTGTC |
| | | CGAGCTGGACAAGGCCGGCTTCATCAAGCGGCAGCTGGTGGAGACCC |
| | | GGCAGATCACCAAGCACGTGGCCCAGATCCTGGACTCCCGGATGAAC |
| | | ACCAAGTACGACGAGAACGACAAGCTGATCCGGGAGGTGAAGGTGA |
| | | TCACCCTGAAGTCCAAGCTGGTGTCCGACTTCCGGAAGGACTTCCAGT |
| | | TCTACAAGGTGCGGGAGATCAACAACTACCACCACGCCCACGACGCC |
| | | TACCTGAACGCCGTGGTGGGCACCGCCCTGATCAAGAAGTACCCCAA |
| | | GCTGGAGTCCGAGTTCGTGTACGGCGACTACAAGGTGTACGACGTGC |
| | | GGAAGATGATCGCCAAGTCCGAGCAGGAGATCGGCAAGGCCACCGC |
| | | CAAGTACTTCTTCTACTCCAACATCATGAACTTCTTCAAGACCGAGAT |
| | | CACCCTGGCCAACGGCGAGATCCGGAAGCGGCCCCTGATCGAGACCA |
| | | ACGGCGAGACCGGCGAGATCGTGTGGGACAAGGGCCGGGACTTCGCC |
| | | ACCGTGCGGAAGGTGCTGTCCATGCCCCAGGTGAACATCGTGAAGAA |
| | | GACCGAGGTGCAGACCGGCGGCTTCTCCAAGGAGTCCATCCTGCCCA |
| | | AGCGGAACTCCGACAAGCTGATCGCCCGGAAGAAGGACTGGGACCCC |
| | | AAGAAGTACGGCGGCTTCGACTCCCCCACCGTGGCCTACTCCGTGCTG |
| | | GTGGTGGCCAAGGTGGAGAAGGGCAAGTCCAAGAAGCTGAAGTCCG |
| | | TGAAGGAGCTGCTGGGCATCACCATCATGGAGCGGTCCTCCTTCGAG |
| | | AAGAACCCCATCGACTTCCTGGAGGCCAAGGGCTACAAGGAGGTGAA |
| | | GAAGGACCTGATCATCAAGCTGCCCAAGTACTCCCTGTTCGAGCTGG |
| | | AGAACGGCCGGAAGCGGATGCTGGCCTCCGCCGGCGAGCTGCAGAA |
| | | GGGCAACGAGCTGGCCCTGCCCTCCAAGTACGTGAACTTCCTGTACCT |
| | | GGCCTCCCACTACGAGAAGCTGAAGGGCTCCCCCGAGGACAACGAGC |
| | | AGAAGCAGCTGTTCGTGGAGCAGCACAAGCACTACCTGGACGAGATC |
| | | ATCGAGCAGATCTCCGAGTTCTCCAAGCGGGTGATCCTGGCCGACGC |
| | | CAACCTGGACAAGGTGCTGTCCGCCTACAACAAGCACCGGGACAAGC |
| | | CCATCCGGGAGCAGGCCGAGAACATCATCCACCTGTTCACCCTGACC |
| | | AACCTGGGCGCCCCCGCCGCCTTCAAGTACTTCGACACCACCATCGA |
| | | CCGGAAGCGGTACACCTCCACCAAGGAGGTGCTGGACGCCACCCTGA |
| | | TCCACCAGTCCATCACCGGCCTGTACGAGACCCGGATCGACCTGTCCC |
| | | AGCTGGGCGGCGACGGCGGCGGCTCCCCCAAGAAGAAGCGGAAGGT |
| | | GTGA |
| 860 | ORF encoding | AUGGACAAGAAGUACAGCAUCGGCCUGGACAUCGGCACGAACAGCG |
| | Sp. Cas9 | UUGGCUGGGCUGUGAUCACGGACGAGUACAAGGUUCCCUCAAAGAA |
| | | GUUCAAGGUGCUGGGCAACACGGACCGGCACAGCAUCAAGAAGAAU |
| | | CUCAUCGGUGCACUGCUGUUCGACAGCGGUGAGACGGCCGAAGCCA |
| | | CGCGGCUGAAGCGGACGGCCCGCCGGCGGUACACGCGGCGGAAGAA |
| | | CCGGAUCUGCUACCUGCAGGAGAUCUUCAGCAACGAGAUGGCCAAG |
| | | GUGGACGACAGCUUCUUCCACCGGCUGGAGGAGAGCUUCCUGGUGG |
| | | AGGAGGACAAGAAGCACGAGCGGCACCCCAUCUUCGGCAACAUCGU |
| | | GGACGAAGUCGCCUACCACGAGAAGUACCCCACCAUCUACCACCUG |
| | | CGGAAGAAGCUGGUGGACUCGACUGACAAGGCCGACCUGCGGCUGA |
| | | UCUACCUGGCACUGGCCCACAUGAUAAAGUUCCGGGGCCACUUCCU |
| | | GAUCGAGGGCGACCUGAACCCUGACAACAGCGACGUGGACAAGCUG |
| | | UUCAUCCAGCUGGUGCAGACCUACAACCAGCUGUUCGAGGAGAACC |
| | | CCAUCAACGCCAGCGGCGUGGACGCCAAGGCCAUCCUCAGCGCCCG |
| | | CCUCAGCAAGAGCCGGCGGCUGGAGAAUCUCAUCGCCCAGCUUCCA |
| | | GGUGAGAAGAAGAAUGGGCUGUUCGGCAAUCUCAUCGCACUCAGCC |
| | | UGGGCCUGACUCCCAACUUCAAGAGCAACUUCGACCUGGCCGAGGA |
| | | CGCCAAGCUGCAGCUCAGCAAGGACACCUACGACGACGACCUGGAC |
| | | AAUCUCCUGGCCCAGAUCGGCGACCAGUACGCCGACCUGUUCCUGG |
| | | CUGCCAAGAAUCUCAGCGACGCCAUCCUGCUCAGCGACAUCCUGCG |
| | | GGUGAACACAGAGAUCACGAAGGCCCCCCUCAGCGCCAGCAUGAUA |
| | | AAGCGGUACGACGAGCACCACCAGGACCUGACGCUGCUGAAGGCAC |
| | | UGGUGCGGCAGCAGCUUCCAGAGAAGUACAAGGAGAUCUUCUUCGA |
| | | CCAGAGCAAGAAUGGGUACGCCGGGUACAUCGACGGUGGUGCCAGC |
| | | CAGGAGGAGUUCUACAAGUUCAUCAAGCCCAUCCUGGAGAAGAUGG |
| | | ACGGCACAGAGGAGCUGCUGGUGAAGCUGAACAGGGAGGACCUGCU |
| | | GCGGAAGCAGCGGACGUUCGACAAUGGGAGCAUCCCCCACCAGAUC |
| | | CACCUGGGUGAGCUGCACGCCAUCCUGCGGCGGCAGGAGGACUUCU |
| | | ACCCCUUCCUGAAGGACAACAGGGAGAAGAUCGAGAAGAUCCUGAC |
| | | GUUCCGGAUCCCCUACUACGUUGGCCCCCUGGCCCGCGGCAACAGC |
| | | CGGUUCGCCUGGAUGACGCGGAAGAGCGAGGAGACGAUCACUCCCU |
| | | GGAACUUCGAGGAAGUCGUGGACAAGGGUGCCAGCGCCCAGAGCUU |
| | | CAUCGAGCGGAUGACGAACUUCGACAAGAAUCUUCCAAACGAGAAG |
| | | GUGCUUCCAAAGCACAGCCUGCUGUACGAGUACUUCACGGUGUACA |
| | | ACGAGCUGACGAAGGUGAAGUACGUGACAGAGGGCAUGCGGAAGC |
| | | CCGCCUUCCUCAGCGGUGAGCAGAAGAAGGCCAUCGUGGACCUGCU |
| | | GUUCAAGACGAACCGGAAGGUGACGGUGAAGCAGCUGAAGGAGGA |
| | | CUACUUCAAGAAGAUCGAGUGCUUCGACAGCGUGGAGAUCAGCGGC |
| | | GUGGAGGACCGGUUCAACGCCAGCCUGGGCACCUACCACGACCUGC |
| | | UGAAGAUCAUCAAGGACAAGGACUUCCUGGACAACGAGGAGAACG |
| | | AGGACAUCCUGGAGGACAUCGUGCUGACGCUGACGCUGUUCGAGGA |
| | | CAGGGAGAUGAUAGAGGAGCGGCUGAAGACCUACGCCCACCUGUUC |
| | | GACGACAAGGUGAUGAAGCAGCUGAAGCGGCGGCGGUACACGGGCU |
| | | GGGGCCGGCUCAGCCGGAAGCUGAUCAAUGGGAUCCGAGACAAGCA |
| | | GAGCGGCAAGACGAUCCUGGACUUCCUGAAGAGCGACGGCUUCGCC |
| | | AACCGGAACUUCAUGCAGCUGAUCCACGACGACAGCCUGACGUUCA |
| | | AGGAGGACAUCCAGAAGGCCCAGGUCAGCGGCCAGGGCGACAGCCU |
| | | GCACGAGCACAUCGCCAAUCUCGCCGGGAGCCCCGCCAUCAAGAAG |
| | | GGGAUCCUGCAGACGGUGAAGGUGGUGGACGAGCUGGUGAAGGUG |
| | | AUGGGCCGGCACAAGCCAGAGAACAUCGUGAUCGAGAUGGCCAGGG |
| | | AGAACCAGACGACUCAAAAGGGGCAGAAGAACAGCAGGGAGCGGA |
| | | UGAAGCGGAUCGAGGAGGGCAUCAAGGAGCUGGGCAGCCAGAUCCU |
| | | GAAGGAGCACCCCGUGGAGAACACUCAACUGCAGAACGAGAAGCUG |
| | | UACCUGUACUACCUGCAGAAUGGGCGAGACAUGUACGUGGACCAGG |
| | | AGCUGGACAUCAACCGGCUCAGCGACUACGACGUGGACCACAUCGU |
| | | UCCCCAGAGCUUCCUGAAGGACGACAGCAUCGACAACAAGGUGCUG |
| | | ACGCGGAGCGACAAGAACCGGGGCAAGAGCGACAACGUUCCCUCAG |
| | | AGGAAGUCGUGAAGAAGAUGAAGAACUACUGGCGGCAGCUGCUGA |
| | | ACGCCAAGCUGAUCACUCAACGGAAGUUCGACAAUCUCACGAAGGC |
| | | CGAGCGGGGUGGCCUCAGCGAGCUGGACAAGGCCGGGUUCAUCAAG |
| | | CGGCAGCUGGUGGAGACGCGGCAGAUCACGAAGCACGUGGCCCAGA |
| | | UCCUGGACAGCCGGAUGAACACGAAGUACGACGAGAACGACAAGCU |
| | | GAUCAGGGAAGUCAAGGUGAUCACGCUGAAGAGCAAGCUGGUCAG |
| | | CGACUUCCGGAAGGACUUCCAGUUCUACAAGGUGAGGGAGAUCAAC |
| | | AACUACCACCACGCCCACGACGCCUACCUGAACGCUGUGGUUGGCA |
| | | CGGCACUGAUCAAGAAGUACCCCAAGCUGGAGAGCGAGUUCGUGUA |
| | | CGGCGACUACAAGGUGUACGACGUGCGGAAGAUGAUAGCCAAGAGC |
| | | GAGCAGGAGAUCGGCAAGGCCACGGCCAAGUACUUCUUCUACAGCA |
| | | ACAUCAUGAACUUCUUCAAGACAGAGAUCACGCUGGCCAAUGGUGA |
| | | GAUCCGGAAGCGGCCCCUGAUCGAGACGAAUGGUGAGACGGGUGAG |
| | | AUCGUGUGGGACAAGGGGCGAGACUUCGCCACGGUGCGGAAGGUGC |
| | | UCAGCAUGCCCCAGGUGAACAUCGUGAAGAAGACAGAAGUCCAGAC |
| | | GGGUGGCUUCAGCAAGGAGAGCAUCCUUCCAAAGCGGAACAGCGAC |
| | | AAGCUGAUCGCCCGCAAGAAGGACUGGGACCCCAAGAAGUACGGUG |
| | | GCUUCGACAGCCCCACCGUGGCCUACAGCGUGCUGGUGGUGGCCAA |
| | | GGUGGAGAAGGGGAAGAGCAAGAAGCUGAAGAGCGUGAAGGAGCU |
| | | GCUGGGCAUCACGAUCAUGGAGCGGAGCAGCUUCGAGAAGAACCCC |
| | | AUCGACUUCCUGGAAGCCAAGGGGUACAAGGAAGUCAAGAAGGACC |
| | | UGAUCAUCAAGCUUCCAAAGUACAGCCUGUUCGAGCUGGAGAAUGG |
| | | GCGGAAGCGGAUGCUGGCCAGCGCCGGUGAGCUGCAGAAGGGGAAC |
| | | GAGCUGGCACUUCCCUCAAAGUACGUGAACUUCCUGUACCUGGCCA |
| | | GCCACUACGAGAAGCUGAAGGGGAGCCCAGAGGACAACGAGCAGAA |
| | | GCAGCUGUUCGUGGAGCAGCACAAGCACUACCUGGACGAGAUCAUC |
| | | GAGCAGAUCAGCGAGUUCAGCAAGCGGGUGAUCCUGGCCGACGCCA |
| | | AUCUCGACAAGGUGCUCAGCGCCUACAACAAGCACCGAGACAAGCC |
| | | CAUCAGGGAGCAGGCCGAGAACAUCAUCCACCUGUUCACGCUGACG |
| | | AAUCUCGGUGCCCCCGCUGCCUUCAAGUACUUCGACACGACGAUCG |
| | | ACCGGAAGCGGUACACGUCGACUAAGGAAGUCCUGGACGCCACGCU |
| | | GAUCCACCAGAGCAUCACGGGCCUGUACGAGACGCGGAUCGACCUC |
| | | AGCCAGCUGGGUGGCGACGGUGGUGGCAGCCCCAAGAAGAAGCGGA |
| | | AGGUGUAG |
| 861 | ORF encoding | AUGGACAAGAAGUACAGCAUCGGCCUCGACAUCGGCACCAACAGCG |
| | Sp. Cas9 | UCGGCUGGGCCGUCAUCACCGACGAGUACAAGGUCCCCAGCAAGAA |
| | | GUUCAAGGUCCUCGGCAACACCGACCGCCACAGCAUCAAGAAGAAC |
| | | CUCAUCGGCGCCCUCCUCUUCGACAGCGGCGAGACCGCCGAGGCCA |
| | | CCCGCCUCAAGCGCACCGCCCGCCGCCGCUACACCCGCCGCAAGAAC |
| | | CGCAUCUGCUACCUCCAGGAGAUCUUCAGCAACGAGAUGGCCAAGG |
| | | UCGACGACAGCUUCUUCCACCGCCUCGAGGAGAGCUUCCUCGUCGA |
| | | GGAGGACAAGAAGCACGAGCGCCACCCCAUCUUCGGCAACAUCGUC |
| | | GACGAGGUCGCCUACCACGAGAAGUACCCCACCAUCUACCACCUCC |
| | | GCAAGAAGCUCGUCGACAGCACCGACAAGGCCGACCUCCGCCUCAU |
| | | CUACCUCGCCCUCGCCCACAUGAUCAAGUUCCGCGGCCACUUCCUC |
| | | AUCGAGGGCGACCUCAACCCCGACAACAGCGACGUCGACAAGCUCU |
| | | UCAUCCAGCUCGUCCAGACCUACAACCAGCUCUUCGAGGAGAACCC |
| | | CAUCAACGCCAGCGGCGUCGACGCCAAGGCCAUCCUCAGCGCCCGC |
| | | CUCAGCAAGAGCCGCCGCCUCGAGAACCUCAUCGCCCAGCUCCCCG |
| | | GCGAGAAGAAGAACGGCCUCUUCGGCAACCUCAUCGCCCUCAGCCU |
| | | CGGCCUCACCCCCAACUUCAAGAGCAACUUCGACCUCGCCGAGGAC |
| | | GCCAAGCUCCAGCUCAGCAAGGACACCUACGACGACGACCUCGACA |
| | | ACCUCCUCGCCCAGAUCGGCGACCAGUACGCCGACCUCUUCCUCGC |
| | | CGCCAAGAACCUCAGCGACGCCAUCCUCCUCAGCGACAUCCUCCGC |
| | | GUCAACACCGAGAUCACCAAGGCCCCCCUCAGCGCCAGCAUGAUCA |
| | | AGCGCUACGACGAGCACCACCAGGACCUCACCCUCCUCAAGGCCCU |
| | | CGUCCGCCAGCAGCUCCCCGAGAAGUACAAGGAGAUCUUCUUCGAC |
| | | CAGAGCAAGAACGGCUACGCCGGCUACAUCGACGGCGGCGCCAGCC |
| | | AGGAGGAGUUCUACAAGUUCAUCAAGCCCAUCCUCGAGAAGAUGGA |
| | | CGGCACCGAGGAGCUCCUCGUCAAGCUCAACCGCGAGGACCUCCUC |
| | | CGCAAGCAGCGCACCUUCGACAACGGCAGCAUCCCCCACCAGAUCC |
| | | ACCUCGGCGAGCUCCACGCCAUCCUCCGCCGCCAGGAGGACUUCUA |
| | | CCCCUUCCUCAAGGACAACCGCGAGAAGAUCGAGAAGAUCCUCACC |
| | | UUCCGCAUCCCCUACUACGUCGGCCCCCUCGCCCGCGGCAACAGCCG |
| | | CUUCGCCUGGAUGACCCGCAAGAGCGAGGAGACCAUCACCCCCUGG |
| | | AACUUCGAGGAGGUCGUCGACAAGGGCGCCAGCGCCCAGAGCUUCA |
| | | UCGAGCGCAUGACCAACUUCGACAAGAACCUCCCCAACGAGAAGGU |
| | | CCUCCCCAAGCACAGCCUCCUCUACGAGUACUUCACCGUCUACAAC |
| | | GAGCUCACCAAGGUCAAGUACGUCACCGAGGGCAUGCGCAAGCCCG |
| | | CCUUCCUCAGCGGCGAGCAGAAGAAGGCCAUCGUCGACCUCCUCUU |
| | | CAAGACCAACCGCAAGGUCACCGUCAAGCAGCUCAAGGAGGACUAC |
| | | UUCAAGAAGAUCGAGUGCUUCGACAGCGUCGAGAUCAGCGGCGUCG |
| | | AGGACCGCUUCAACGCCAGCCUCGGCACCUACCACGACCUCCUCAA |
| | | GAUCAUCAAGGACAAGGACUUCCUCGACAACGAGGAGAACGAGGAC |
| | | AUCCUCGAGGACAUCGUCCUCACCCUCACCCUCUUCGAGGACCGCG |
| | | AGAUGAUCGAGGAGCGCCUCAAGACCUACGCCCACCUCUUCGACGA |
| | | CAAGGUCAUGAAGCAGCUCAAGCGCCGCCGCUACACCGGCUGGGGC |
| | | CGCCUCAGCCGCAAGCUCAUCAACGGCAUCCGCGACAAGCAGAGCG |
| | | GCAAGACCAUCCUCGACUUCCUCAAGAGCGACGGCUUCGCCAACCG |
| | | CAACUUCAUGCAGCUCAUCCACGACGACAGCCUCACCUUCAAGGAG |
| | | GACAUCCAGAAGGCCCAGGUCAGCGGCCAGGGCGACAGCCUCCACG |
| | | AGCACAUCGCCAACCUCGCCGGCAGCCCCGCCAUCAAGAAGGGCAU |
| | | CCUCCAGACCGUCAAGGUCGUCGACGAGCUCGUCAAGGUCAUGGGC |
| | | CGCCACAAGCCCGAGAACAUCGUCAUCGAGAUGGCCCGCGAGAACC |
| | | AGACCACCCAGAAGGGCCAGAAGAACAGCCGCGAGCGCAUGAAGCG |
| | | CAUCGAGGAGGGCAUCAAGGAGCUCGGCAGCCAGAUCCUCAAGGAG |
| | | CACCCCGUCGAGAACACCCAGCUCCAGAACGAGAAGCUCUACCUCU |
| | | ACUACCUCCAGAACGGCCGCGACAUGUACGUCGACCAGGAGCUCGA |
| | | CAUCAACCGCCUCAGCGACUACGACGUCGACCACAUCGUCCCCCAG |
| | | AGCUUCCUCAAGGACGACAGCAUCGACAACAAGGUCCUCACCCGCA |
| | | GCGACAAGAACCGCGGCAAGAGCGACAACGUCCCCAGCGAGGAGGU |
| | | CGUCAAGAAGAUGAAGAACUACUGGCGCCAGCUCCUCAACGCCAAG |
| | | CUCAUCACCCAGCGCAAGUUCGACAACCUCACCAAGGCCGAGCGCG |
| | | GCGGCCUCAGCGAGCUCGACAAGGCCGGCUUCAUCAAGCGCCAGCU |
| | | CGUCGAGACCCGCCAGAUCACCAAGCACGUCGCCCAGAUCCUCGAC |
| | | AGCCGCAUGAACACCAAGUACGACGAGAACGACAAGCUCAUCCGCG |
| | | AGGUCAAGGUCAUCACCCUCAAGAGCAAGCUCGUCAGCGACUUCCG |
| | | CAAGGACUUCCAGUUCUACAAGGUCCGCGAGAUCAACAACUACCAC |
| | | CACGCCCACGACGCCUACCUCAACGCCGUCGUCGGCACCGCCCUCAU |
| | | CAAGAAGUACCCCAAGCUCGAGAGCGAGUUCGUCUACGGCGACUAC |
| | | AAGGUCUACGACGUCCGCAAGAUGAUCGCCAAGAGCGAGCAGGAGA |
| | | UCGGCAAGGCCACCGCCAAGUACUUCUUCUACAGCAACAUCAUGAA |
| | | CUUCUUCAAGACCGAGAUCACCCUCGCCAACGGCGAGAUCCGCAAG |
| | | CGCCCCCUCAUCGAGACCAACGGCGAGACCGGCGAGAUCGUCUGGG |
| | | ACAAGGGCCGCGACUUCGCCACCGUCCGCAAGGUCCUCAGCAUGCC |
| | | CCAGGUCAACAUCGUCAAGAAGACCGAGGUCCAGACCGGCGGCUUC |
| | | AGCAAGGAGAGCAUCCUCCCCAAGCGCAACAGCGACAAGCUCAUCG |
| | | CCCGCAAGAAGGACUGGGACCCCAAGAAGUACGGCGGCUUCGACAG |
| | | CCCCACCGUCGCCUACAGCGUCCUCGUCGUCGCCAAGGUCGAGAAG |
| | | GGCAAGAGCAAGAAGCUCAAGAGCGUCAAGGAGCUCCUCGGCAUCA |
| | | CCAUCAUGGAGCGCAGCAGCUUCGAGAAGAACCCCAUCGACUUCCU |
| | | CGAGGCCAAGGGCUACAAGGAGGUCAAGAAGGACCUCAUCAUCAAG |
| | | CUCCCCAAGUACAGCCUCUUCGAGCUCGAGAACGGCCGCAAGCGCA |
| | | UGCUCGCCAGCGCCGGCGAGCUCCAGAAGGGCAACGAGCUCGCCCU |
| | | CCCCAGCAAGUACGUCAACUUCCUCUACCUCGCCAGCCACUACGAG |
| | | AAGCUCAAGGGCAGCCCCGAGGACAACGAGCAGAAGCAGCUCUUCG |
| | | UCGAGCAGCACAAGCACUACCUCGACGAGAUCAUCGAGCAGAUCAG |
| | | CGAGUUCAGCAAGCGCGUCAUCCUCGCCGACGCCAACCUCGACAAG |
| | | GUCCUCAGCGCCUACAACAAGCACCGCGACAAGCCCAUCCGCGAGC |
| | | AGGCCGAGAACAUCAUCCACCUCUUCACCCUCACCAACCUCGGCGC |
| | | CCCCGCCGCCUUCAAGUACUUCGACACCACCAUCGACCGCAAGCGC |
| | | UACACCAGCACCAAGGAGGUCCUCGACGCCACCCUCAUCCACCAGA |
| | | GCAUCACCGGCCUCUACGAGACCCGCAUCGACCUCAGCCAGCUCGG |
| | | CGGCGACGGCGGCGGCAGCCCCAAGAAGAAGCGCAAGGUCUAG |
| 862 | Open reading | AUGGACAAGAAGUACUCCAUCGGCCUGGACAUCGGCACCAACUCCG |
| | frame for Cas9 | UGGGCUGGGCCGUGAUCACCGACGAGUACAAGGUGCCCUCCAAGAA |
| | with Hibit tag | GUUCAAGGUGCUGGGCAACACCGACCGGCACUCCAUCAAGAAGAAC |
| | | CUGAUCGGCGCCCUGCUGUUCGACUCCGGCGAGACCGCCGAGGCCA |
| | | CCCGGCUGAAGCGGACCGCCCGGCGGCGGUACACCCGGCGGAAGAA |
| | | CCGGAUCUGCUACCUGCAGGAGAUCUUCUCCAACGAGAUGGCCAAG |
| | | GUGGACGACUCCUUCUUCCACCGGCUGGAGGAGUCCUUCCUGGUGG |
| | | AGGAGGACAAGAAGCACGAGCGGCACCCCAUCUUCGGCAACAUCGU |
| | | GGACGAGGUGGCCUACCACGAGAAGUACCCCACCAUCUACCACCUG |
| | | CGGAAGAAGCUGGUGGACUCCACCGACAAGGCCGACCUGCGGCUGA |
| | | UCUACCUGGCCCUGGCCCACAUGAUCAAGUUCCGGGGCCACUUCCU |
| | | GAUCGAGGGCGACCUGAACCCCGACAACUCCGACGUGGACAAGCUG |
| | | UUCAUCCAGCUGGUGCAGACCUACAACCAGCUGUUCGAGGAGAACC |
| | | CCAUCAACGCCUCCGGCGUGGACGCCAAGGCCAUCCUGUCCGCCCG |
| | | GCUGUCCAAGUCCCGGCGGCUGGAGAACCUGAUCGCCCAGCUGCCC |
| | | GGCGAGAAGAAGAACGGCCUGUUCGGCAACCUGAUCGCCCUGUCCC |
| | | UGGGCCUGACCCCCAACUUCAAGUCCAACUUCGACCUGGCCGAGGA |
| | | CGCCAAGCUGCAGCUGUCCAAGGACACCUACGACGACGACCUGGAC |
| | | AACCUGCUGGCCCAGAUCGGCGACCAGUACGCCGACCUGUUCCUGG |
| | | CCGCCAAGAACCUGUCCGACGCCAUCCUGCUGUCCGACAUCCUGCG |
| | | GGUGAACACCGAGAUCACCAAGGCCCCCCUGUCCGCCUCCAUGAUC |
| | | AAGCGGUACGACGAGCACCACCAGGACCUGACCCUGCUGAAGGCCC |
| | | UGGUGCGGCAGCAGCUGCCCGAGAAGUACAAGGAGAUCUUCUUCGA |
| | | CCAGUCCAAGAACGGCUACGCCGGCUACAUCGACGGCGGCGCCUCC |
| | | CAGGAGGAGUUCUACAAGUUCAUCAAGCCCAUCCUGGAGAAGAUGG |
| | | ACGGCACCGAGGAGCUGCUGGUGAAGCUGAACCGGGAGGACCUGCU |
| | | GCGGAAGCAGCGGACCUUCGACAACGGCUCCAUCCCCCACCAGAUC |
| | | CACCUGGGCGAGCUGCACGCCAUCCUGCGGCGGCAGGAGGACUUCU |
| | | ACCCCUUCCUGAAGGACAACCGGGAGAAGAUCGAGAAGAUCCUGAC |
| | | CUUCCGGAUCCCCUACUACGUGGGCCCCCUGGCCCGGGGCAACUCC |
| | | CGGUUCGCCUGGAUGACCCGGAAGUCCGAGGAGACCAUCACCCCCU |
| | | GGAACUUCGAGGAGGUGGUGGACAAGGGCGCCUCCGCCCAGUCCUU |
| | | CAUCGAGCGGAUGACCAACUUCGACAAGAACCUGCCCAACGAGAAG |
| | | GUGCUGCCCAAGCACUCCCUGCUGUACGAGUACUUCACCGUGUACA |
| | | ACGAGCUGACCAAGGUGAAGUACGUGACCGAGGGCAUGCGGAAGCC |
| | | CGCCUUCCUGUCCGGCGAGCAGAAGAAGGCCAUCGUGGACCUGCUG |
| | | UUCAAGACCAACCGGAAGGUGACCGUGAAGCAGCUGAAGGAGGACU |
| | | ACUUCAAGAAGAUCGAGUGCUUCGACUCCGUGGAGAUCUCCGGCGU |
| | | GGAGGACCGGUUCAACGCCUCCCUGGGCACCUACCACGACCUGCUG |
| | | AAGAUCAUCAAGGACAAGGACUUCCUGGACAACGAGGAGAACGAG |
| | | GACAUCCUGGAGGACAUCGUGCUGACCCUGACCCUGUUCGAGGACC |
| | | GGGAGAUGAUCGAGGAGCGGCUGAAGACCUACGCCCACCUGUUCGA |
| | | CGACAAGGUGAUGAAGCAGCUGAAGCGGCGGCGGUACACCGGCUGG |
| | | GGCCGGCUGUCCCGGAAGCUGAUCAACGGCAUCCGGGACAAGCAGU |
| | | CCGGCAAGACCAUCCUGGACUUCCUGAAGUCCGACGGCUUCGCCAA |
| | | CCGGAACUUCAUGCAGCUGAUCCACGACGACUCCCUGACCUUCAAG |
| | | GAGGACAUCCAGAAGGCCCAGGUGUCCGGCCAGGGCGACUCCCUGC |
| | | ACGAGCACAUCGCCAACCUGGCCGGCUCCCCCGCCAUCAAGAAGGG |
| | | CAUCCUGCAGACCGUGAAGGUGGUGGACGAGCUGGUGAAGGUGAU |
| | | GGGCCGGCACAAGCCCGAGAACAUCGUGAUCGAGAUGGCCCGGGAG |
| | | AACCAGACCACCCAGAAGGGCCAGAAGAACUCCCGGGAGCGGAUGA |
| | | AGCGGAUCGAGGAGGGCAUCAAGGAGCUGGGCUCCCAGAUCCUGAA |
| | | GGAGCACCCCGUGGAGAACACCCAGCUGCAGAACGAGAAGCUGUAC |
| | | CUGUACUACCUGCAGAACGGCCGGGACAUGUACGUGGACCAGGAGC |
| | | UGGACAUCAACCGGCUGUCCGACUACGACGUGGACCACAUCGUGCC |
| | | CCAGUCCUUCCUGAAGGACGACUCCAUCGACAACAAGGUGCUGACC |
| | | CGGUCCGACAAGAACCGGGGCAAGUCCGACAACGUGCCCUCCGAGG |
| | | AGGUGGUGAAGAAGAUGAAGAACUACUGGCGGCAGCUGCUGAACG |
| | | CCAAGCUGAUCACCCAGCGGAAGUUCGACAACCUGACCAAGGCCGA |
| | | GCGGGGCGGCCUGUCCGAGCUGGACAAGGCCGGCUUCAUCAAGCGG |
| | | CAGCUGGUGGAGACCCGGCAGAUCACCAAGCACGUGGCCCAGAUCC |
| | | UGGACUCCCGGAUGAACACCAAGUACGACGAGAACGACAAGCUGAU |
| | | CCGGGAGGUGAAGGUGAUCACCCUGAAGUCCAAGCUGGUGUCCGAC |
| | | UUCCGGAAGGACUUCCAGUUCUACAAGGUGCGGGAGAUCAACAACU |
| | | ACCACCACGCCCACGACGCCUACCUGAACGCCGUGGUGGGCACCGC |
| | | CCUGAUCAAGAAGUACCCCAAGCUGGAGUCCGAGUUCGUGUACGGC |
| | | GACUACAAGGUGUACGACGUGCGGAAGAUGAUCGCCAAGUCCGAGC |
| | | AGGAGAUCGGCAAGGCCACCGCCAAGUACUUCUUCUACUCCAACAU |
| | | CAUGAACUUCUUCAAGACCGAGAUCACCCUGGCCAACGGCGAGAUC |
| | | CGGAAGCGGCCCCUGAUCGAGACCAACGGCGAGACCGGCGAGAUCG |
| | | UGUGGGACAAGGGCCGGGACUUCGCCACCGUGCGGAAGGUGCUGUC |
| | | CAUGCCCCAGGUGAACAUCGUGAAGAAGACCGAGGUGCAGACCGGC |
| | | GGCUUCUCCAAGGAGUCCAUCCUGCCCAAGCGGAACUCCGACAAGC |
| | | UGAUCGCCCGGAAGAAGGACUGGGACCCCAAGAAGUACGGCGGCUU |
| | | CGACUCCCCCACCGUGGCCUACUCCGUGCUGGUGGUGGCCAAGGUG |
| | | GAGAAGGGCAAGUCCAAGAAGCUGAAGUCCGUGAAGGAGCUGCUG |
| | | GGCAUCACCAUCAUGGAGCGGUCCUCCUUCGAGAAGAACCCCAUCG |
| | | ACUUCCUGGAGGCCAAGGGCUACAAGGAGGUGAAGAAGGACCUGA |
| | | UCAUCAAGCUGCCCAAGUACUCCCUGUUCGAGCUGGAGAACGGCCG |
| | | GAAGCGGAUGCUGGCCUCCGCCGGCGAGCUGCAGAAGGGCAACGAG |
| | | CUGGCCCUGCCCUCCAAGUACGUGAACUUCCUGUACCUGGCCUCCC |
| | | ACUACGAGAAGCUGAAGGGCUCCCCCGAGGACAACGAGCAGAAGCA |
| | | GCUGUUCGUGGAGCAGCACAAGCACUACCUGGACGAGAUCAUCGAG |
| | | CAGAUCUCCGAGUUCUCCAAGCGGGUGAUCCUGGCCGACGCCAACC |
| | | UGGACAAGGUGCUGUCCGCCUACAACAAGCACCGGGACAAGCCCAU |
| | | CCGGGAGCAGGCCGAGAACAUCAUCCACCUGUUCACCCUGACCAAC |
| | | CUGGGCGCCCCCGCCGCCUUCAAGUACUUCGACACCACCAUCGACC |
| | | GGAAGCGGUACACCUCCACCAAGGAGGUGCUGGACGCCACCCUGAU |
| | | CCACCAGUCCAUCACCGGCCUGUACGAGACCCGGAUCGACCUGUCC |
| | | CAGCUGGGCGGCGACGGCGGCGGCUCCCCCAAGAAGAAGCGGAAGG |
| | | UGUCCGAGUCCGCCACCCCCGAGUCCGUGUCCGGCUGGCGGCUGUU |
| | | CAAGAAGAUCUCCUGA |
| 863 | Amino acid | MDKKYSIGLDIGTNSVGWAVITDEYKVPSKKFKVLGNTDRHSIKKNLIG |
| | sequence for | ALLFDSGETAEATRLKRTARRRYTRRKNRICYLQEIFSNEMAKVDDSFFH |
| | Cas9 encoded by | RLEESFLVEEDKKHERHPIFGNIVDEVAYHEKYPTIYHLRKKLVDSTDKA |
| | SEQ ID Nos. | DLRLIYLALAHMIKFRGHFLIEGDLNPDNSDVDKLFIQLVQTYNQLFEEN |
| | 858-862 | PINASGVDAKAILSARLSKSRRLENLIAQLPGEKKNGLFGNLIALSLGLTP |
| | | NFKSNFDLAEDAKLQLSKDTYDDDLDNLLAQIGDQYADLFLAAKNLSD |
| | | AILLSDILRVNTEITKAPLSASMIKRYDEHHQDLTLLKALVRQQLPEKYKE |
| | | IFFDQSKNGYAGYIDGGASQEEFYKFIKPILEKMDGTEELLVKLNREDLL |
| | | RKQRTFDNGSIPHQIHLGELHAILRRQEDFYPFLKDNREKIEKILTFRIPYY |
| | | VGPLARGNSRFAWMTRKSEETITPWNFEEVVDKGASAQSFIERMTNFDK |
| | | NLPNEKVLPKHSLLYEYFTVYNELTKVKYVTEGMRKPAFLSGEQKKAIV |
| | | DLLFKTNRKVTVKQLKEDYFKKIECFDSVEISGVEDRFNASLGTYHDLLK |
| | | IIKDKDFLDNEENEDILEDIVLTLTLFEDREMIEERLKTYAHLFDDKVMKQ |
| | | LKRRRYTGWGRLSRKLINGIRDKQSGKTILDFLKSDGFANRNFMQLIHDD |
| | | SLTFKEDIQKAQVSGQGDSLHEHIANLAGSPAIKKGILQTVKVVDELVKV |
| | | MGRHKPENIVIEMARENQTTQKGQKNSRERMKRIEEGIKELGSQILKEHP |
| | | VENTQLQNEKLYLYYLQNGRDMYVDQELDINRLSDYDVDHIVPQSFLK |
| | | DDSIDNKVLTRSDKNRGKSDNVPSEEVVKKMKNYWRQLLNAKLITQRK |
| | | FDNLTKAERGGLSELDKAGFIKRQLVETRQITKHVAQILDSRMNTKYDE |
| | | NDKLIREVKVITLKSKLVSDFRKDFQFYKVREINNYHHAHDAYLNAVVG |
| | | TALIKKYPKLESEFVYGDYKVYDVRKMIAKSEQEIGKATAKYFFYSNIM |
| | | NFFKTEITLANGEIRKRPLIETNGETGEIVWDKGRDFATVRKVLSMPQVNI |
| | | VKKTEVQTGGFSKESILPKRNSDKLIARKKDWDPKKYGGFDSPTVAYSV |
| | | LVVAKVEKGKSKKLKSVKELLGITIMERSSFEKNPIDFLEAKGYKEVKKD |
| | | LIIKLPKYSLFELENGRKRMLASAGELQKGNELALPSKYVNFLYLASHYE |
| | | KLKGSPEDNEQKQLFVEQHKHYLDEIIEQISEFSKRVILADANLDKVLSA |
| | | YNKHRDKPIREQAENIIHLFTLTNLGAPAAFKYFDTTIDRKRYTSTKEVLD |
| | | ATLIHQSITGLYETRIDLSQLGGDGGGSPKKKRKV |
| 864 | Amino acid | MDKKYSIGLDIGTNSVGWAVITDEYKVPSKKFKVLGNTDRHSIKKNLIG |
| | sequence for | ALLFDSGETAEATRLKRTARRRYTRRKNRICYLQEIFSNEMAKVDDSFFH |
| | Cas9 with Hibit | RLEESFLVEEDKKHERHPIFGNIVDEVAYHEKYPTIYHLRKKLVDSTDKA |
| | tag | DLRLIYLALAHMIKFRGHFLIEGDLNPDNSDVDKLFIQLVQTYNQLFEEN |
| | | PINASGVDAKAILSARLSKSRRLENLIAQLPGEKKNGLFGNLIALSLGLTP |
| | | NFKSNFDLAEDAKLQLSKDTYDDDLDNLLAQIGDQYADLFLAAKNLSD |
| | | AILLSDILRVNTEITKAPLSASMIKRYDEHHQDLTLLKALVRQQLPEKYKE |
| | | IFFDQSKNGYAGYIDGGASQEEFYKFIKPILEKMDGTEELLVKLNREDLL |
| | | RKQRTFDNGSIPHQIHLGELHAILRRQEDFYPFLKDNREKIEKILTFRIPYY |
| | | VGPLARGNSRFAWMTRKSEETITPWNFEEVVDKGASAQSFIERMTNFDK |
| | | NLPNEKVLPKHSLLYEYFTVYNELTKVKYVTEGMRKPAFLSGEQKKAIV |
| | | DLLFKTNRKVTVKQLKEDYFKKIECFDSVEISGVEDRFNASLGTYHDLLK |
| | | IIKDKDFLDNEENEDILEDIVLTLTLFEDREMIEERLKTYAHLFDDKVMKQ |
| | | LKRRRYTGWGRLSRKLINGIRDKQSGKTILDFLKSDGFANRNFMQLIHDD |
| | | SLTFKEDIQKAQVSGQGDSLHEHIANLAGSPAIKKGILQTVKVVDELVKV |
| | | MGRHKPENIVIEMARENQTTQKGQKNSRERMKRIEEGIKELGSQILKEHP |
| | | VENTQLQNEKLYLYYLQNGRDMYVDQELDINRLSDYDVDHIVPQSFLK |
| | | DDSIDNKVLTRSDKNRGKSDNVPSEEVVKKMKNYWRQLLNAKLITQRK |
| | | FDNLTKAERGGLSELDKAGFIKRQLVETRQITKHVAQILDSRMNTKYDE |
| | | NDKLIREVKVITLKSKLVSDFRKDFQFYKVREINNYHHAHDAYLNAVVG |
| | | TALIKKYPKLESEFVYGDYKVYDVRKMIAKSEQEIGKATAKYFFYSNIM |
| | | NFFKTEITLANGEIRKRPLIETNGETGEIVWDKGRDFATVRKVLSMPQVNI |
| | | VKKTEVQTGGFSKESILPKRNSDKLIARKKDWDPKKYGGFDSPTVAYSV |
| | | LVVAKVEKGKSKKLKSVKELLGITIMERSSFEKNPIDFLEAKGYKEVKKD |
| | | LIIKLPKYSLFELENGRKRMLASAGELQKGNELALPSKYVNFLYLASHYE |
| | | KLKGSPEDNEQKQLFVEQHKHYLDEIIEQISEFSKRVILADANLDKVLSA |
| | | YNKHRDKPIREQAENIIHLFTLTNLGAPAAFKYFDTTIDRKRYTSTKEVLD |
| | | ATLIHQSITGLYETRIDLSQLGGDGGGSPKKKRKVSESATPESVSGWRLF |
| | | KKIS |

[0351] In some embodiments, the insertion template comprises the SERPINA1 sequence of SEQ ID NO: 717 (Construct 7) or 719 (Construct 8). In some embodiments, the insertion template comprises a nucleic acid sequence having at least 95, 96, 97, 98, 99% identity to SEQ ID NO: 717 (Construct 7) or 719 (Construct 8). In some embodiments, the insertion template comprises non-wt codon usage at a region (or one or more regions) of the sequence corresponding to bases 409-431, 409-410, 412-431, 415-418, 506-528, 506-525, 519-522, 527-528, 538-560, 538-557, 551-554, 559-560, 957-977, 970-976, 1403-1436, 1403-1425, 1410-1436, 1418-1424, 1423-1435, or any combination thereof.

### EXAMPLES

[0352] The following examples are provided to illustrate certain disclosed embodiments and are not to be construed as limiting the scope of this disclosure in any way.

### Example 1. Materials and Methods

### Next-Generation Sequencing (“NGS”) and Analysis for On-Target Cleavage Efficiency

[0353] Genomic DNA was extracted using a commercial kit, e.g. Zymo Research DNA Extraction Kit (Catalog #D3012), according to manufacturer's protocol.

[0354] To quantitatively determine the efficiency of editing at the target location in the genome, deep sequencing was utilized to identify the presence of insertions and deletions introduced by gene editing. PCR primers were designed around the target site within the gene of interest (e.g., SERPINA1), and the genomic area of interest was amplified. Primer sequence design was done as is standard in the field.

[0355] Additional PCR was performed according to the manufacturer's protocols (Illumina) to add chemistry for sequencing. The amplicons were sequenced on an Illumina MiSeq instrument. The reads were aligned to the human reference genome (e.g., hg38) after eliminating those having low quality scores. The resulting files containing the reads were mapped to the reference genome (BAM files), where reads that overlapped the target region of interest were selected and the number of wild type reads versus the number of reads which contain an insertion or deletion (“indel”) was calculated.

[0356] The editing percentage (e.g., the “editing efficiency” or “indel percent”) as used in the examples is defined as the total number of sequence reads with insertions or deletions (“indels”) over the total number of sequence reads, including wild type.

### Preparation of Lipid Nanoparticles

[0357] The lipid components were dissolved in 100% ethanol at various molar ratios. The RNA cargos (e.g., Cas9 mRNA and sgRNA) were dissolved in 25 mM citrate buffer, 100 mM NaCl, pH 5.0, resulting in a concentration of RNA cargo of approximately 0.45 mg/mL.

[0358] The lipid nucleic acid assemblies contained ionizable Lipid A ((9Z,12Z)-3-((4,4-bis(octyloxy)butanoyl)oxy)-2-((((3-(diethylamino)propoxy)carbonyl)oxy)methyl)propyl octadeca-9,12-dienoate, also called 3-((4,4-bis(octyloxy)butanoyl)oxy)-2-((((3-(diethylamino)propoxy)carbonyl)oxy)methyl)propyl (9Z,12Z)-octadeca-9,12-dienoate), cholesterol, 1,2-distearoyl-sn-glycero-3-phosphocholine (DSPC), and 1,2-dimyristoyl-rac-glycero-3-methylpolyoxyethylene glycol 2000 (PEG2k-DMG) in a 50:38:9:3 molar ratio, respectively. The lipid nucleic acid assemblies were formulated with a lipid amine to RNA phosphate (N:P) molar ratio of about 6, and a ratio of gRNA to mRNA of 1:2 by weight unless otherwise specified.

[0359] Lipid nanoparticles (LNPs) were prepared using a cross-flow technique utilizing impinging jet mixing of the lipid in ethanol with two volumes of RNA solutions and one volume of water. The lipids in ethanol were mixed through a mixing cross with the two volumes of RNA solution. A fourth stream of water was mixed with the outlet stream of the cross through an inline tee (See WO2016010840 FIG. 2.). The LNPs were held for 1 hour at room temperature (RT), and further diluted with water (approximately 1:1 v/v). LNPs were concentrated using tangential flow filtration on a flat sheet cartridge (Sartorius, 100 kD MWCO) and buffer exchanged into 50 mM Tris, 45 mM NaCl, 5% (w/v) sucrose, pH 7.5 (TSS). Alternatively, the LNP's were optionally concentrated using 100 kDa Amicon spin filter and buffer exchanged using PD-10 desalting columns (GE) into TSS. The resulting mixture was then filtered using a 0.2 μm sterile filter. The final LNP was stored at 4° C. or −80° C. until further use.

In Vitro Transcription (“IVT”) of mRNA

[0360] Capped and polyadenylated mRNA containing N1-methyl pseudo-U was generated by in vitro transcription using a linearized plasmid DNA template and T7 RNA polymerase. Plasmid DNA containing a T7 promoter, a sequence for transcription, and a polyadenylation sequence was linearized by incubating at 37° C. for 2 hours with XbaI with the following conditions: 200 ng/μL plasmid, 2 U/μL XbaI (NEB), and 1× reaction buffer. The XbaI was inactivated by heating the reaction at 65° C. for 20 min. The linearized plasmid was purified from enzyme and buffer salts. The IVT reaction to generate modified mRNA was performed by incubating at 37° C. for 1.5-4 hours in the following conditions: 50 ng/μL linearized plasmid; 2-5 mM each of GTP, ATP, CTP, and N1-methyl pseudo-UTP (Trilink); 10-25 mM ARCA (Trilink); 5 U/μL T7 RNA polymerase (NEB); 1 U/μL Murine Rnase inhibitor (NEB); 0.004 U/μL Inorganic E. coli pyrophosphatase (NEB); and 1× reaction buffer. TURBO Dnase (ThermoFisher) was added to a final concentration of 0.01 U/μL, and the reaction was incubated for an additional 30 minutes to remove the DNA template. The mRNA was purified using a MegaClear Transcription Clean-up kit (ThermoFisher) or a Rneasy Maxi kit (Qiagen) per the manufacturers' protocols. Alternatively, the mRNA was purified through a precipitation protocol, which in some cases was followed by HPLC-based purification. Briefly, after the Dnase digestion, mRNA is purified using LiCl precipitation, ammonium acetate precipitation and sodium acetate precipitation. For HPLC purified mRNA, after the LiCl precipitation and reconstitution, the mRNA was purified by RP-IP HPLC (see, e.g., Kariko, et al. Nucleic Acids Research, 2011, Vol. 39, No. 21 e142). The fractions chosen for pooling were combined and desalted by sodium acetate/ethanol precipitation as described above. In a further alternative method, mRNA was purified with a LiCl precipitation method followed by further purification by tangential flow filtration. RNA concentrations were determined by measuring the light absorbance at 260 nm (Nanodrop), and transcripts were analyzed by capillary electrophoresis by Bioanlayzer (Agilent).

[0361] Streptococcus pyogenes (“Spy”) Cas9 mRNA was generated from plasmid DNA encoding an open reading frame according to SEQ ID NOs: 857-864 (see sequences in Table 9B). When SEQ ID NOs: 857-864 are referred to below with respect to RNAs, it is understood that Ts should be replaced with Us (which were N1-methyl pseudouridines as described above). Messenger RNAs used in the Examples include a 5′ cap and a 3′ poly-A tail, e.g., up to 100 nts, and are identified by the SEQ ID NOs: 858-862 in Table 9B. Guide RNAs are chemically synthesized by methods known in the art.

### Cloning and Plasmid Preparation

[0362] A bidirectional insertion construct flanked by AAV2 ITRs was synthesized and cloned into pUC57-Kan by a commercial vendor. The resulting construct (P00147) was used as the parental cloning vector for other vectors. The other insertion constructs (without ITRs) were also commercially synthesized and cloned into pUC57. Purified plasmid was digested with BglII restriction enzyme (New England BioLabs, cat #R0144S), and the insertion constructs were cloned into the parental vector. Plasmid was propagated in Stbl3™ Chemically Competent E. coli (Thermo Fisher, Cat #C737303).

### AAV Production

[0363] Triple transfection in HEK293 cells was used to package genomes with constructs of interest for AAV8 and AAV-DJ production and resulting vectors were purified from both lysed cells and culture media using routine methods, e.g., chromatography or iodixanol gradient ultracentrifugation (See, e.g., Lock et al., Hum Gene Ther. 2010 October; 21(10):1259-71). Isolated AAV was dialyzed in storage buffer (PBS with 0.001% Pluronic F68). AAV titer was determined by qPCR using primers/probe located within the ITR region.

### In Vivo Delivery of LNP and AAV

[0364] Mice at 6-8 weeks in age were dosed with both AAV and LNP, or vehicle (PBS+0.001% Pluronic for AAV vehicle, TSS for LNP vehicle) via the lateral tail vein. AAV were administered in a volume of 0.1 mL per animal with amounts (vector genomes/mouse, “vg/ms”) as described herein. LNPs were diluted in TSS and administered at amounts as indicated herein, at about 5 l/gram body weight. Volumes of LNP and AAV are mixed pre-dose and dosed simultaneously. At various times points post-treatment, serum was collected for certain analyses as described further below.

Human Alpha 1-Antitrypsin (hA1AT) ELISA Analysis

[0365] For in vivo studies, blood was collected, and the serum was isolated as indicated. The total human alpha 1-antitripsin levels were determined using an Alpha 1-Antitrypsin ELISA Kit (Human) (Aviva Biosystems, Cat #OKIA00048) according to manufacturer's protocol. Serum hA1AT levels were quantitated off a standard curve using 4 parameter logistic fit and expressed as g/mL of serum.

[0366] It is understood that guide sequences may or may not include the zeros before the guide number. That is G000400 is the same as G400, or with intermediate numbers of zeros prior to 400.

### Example 2—In Vivo Editing of hSERPINA1 PIZ Transgene

[0367] Three sgRNA were assessed for editing via indel formation and expression of Alpha-1-anti-trypsin (A1AT) protein from hSERPINA1 PIZ variant transgene. LNPs tested in this Example were prepared and delivered to mice as described in Example 1. The three sgRNAs specified in Table 8 were each assessed at four dose levels (0.3, 0.1. 0.03, and 0.01 mg/kg) in a dose response assay. Three weeks post dose, the animals were euthanized, liver tissue and blood were collected to assess liver editing and hA1AT expression levels in serum, respectively. Indel formation was determined by NGS as described in Example 1. Human A1AT levels in serum were determined by ELISA (Aviva Biosystems, Cat #OKIA00048) as described in Example 1. Editing results at the hSERPINA1 locus are shown in FIG. 1 and Table 10. Serum hA1AT levels are shown in FIG. 2A and Table 11. Relative expression of A1AT in serum was calculated as a percent in comparison to the TSS group and is shown in FIG. 2B and Table 11.

TABLE 10
Mean percent editing in mouse liver

| Treatment | | Dose | Mean | | |
|---|---|---|---|---|---|
| Group | Guide | (mpk) | % Indel | SD | Samples |
| Group 1 | G000409 | 0.01 | 7.0 | 3.9 | 4 |
| Group 2 | G000409 | 0.03 | 20.2 | 3.0 | 4 |
| Group 3 | G000409 | 0.1 | 45.3 | 2.6 | 4 |
| Group 4 | G000409 | 0.3 | 44.3 | 2.0 | 4 |
| Group 5 | G000414 | 0.01 | 4.1 | 1.6 | 4 |
| Group 6 | G000414 | 0.03 | 22.7 | 6.4 | 4 |
| Group 7 | G000414 | 0.1 | 39.2 | 4.0 | 4 |
| Group 8 | G000414 | 0.3 | 42.2 | 3.5 | 4 |
| Group 9 | G000415 | 0.01 | 2.4 | 0.6 | 4 |
| Group 10 | G000415 | 0.03 | 11.1 | 3.2 | 4 |
| Group 11 | G000415 | 0.1 | 31.2 | 2.6 | 4 |
| Group 12 | G000415 | 0.3 | 39.4 | 2.3 | 4 |
| Group 13 | TSS | — | 0.1 | 0.0 | 4 |

TABLE 11
hA1AT levels in serum

| | | | Mean | | % | |
|---|---|---|---|---|---|---|
| Treatment | | Dose | μg/mL | | A1AT | |
| Group | Guide | (mpk) | A1AT | SD | KD | Samples |
| Group 1 | G000409 | 0.01 | 1647.6 | 270.2 | 23.8 | 4 |
| Group 2 | G000409 | 0.03 | 804.4 | 159.8 | 62.8 | 4 |
| Group 3 | G000409 | 0.1 | 181.5 | 35.2 | 91.6 | 4 |
| Group 4 | G000409 | 0.3 | 14.9 | 18.2 | 99.3 | 4 |
| Group 5 | G000414 | 0.01 | 2328.8 | 247.7 | 0.0 | 4 |
| Group 6 | G000414 | 0.03 | 1239.7 | 210.7 | 42.6 | 4 |
| Group 7 | G000414 | 0.1 | 220.4 | 48.9 | 89.8 | 4 |
| Group 8 | G000414 | 0.3 | 47.1 | 7.8 | 97.8 | 4 |
| Group 9 | G000415 | 0.01 | 2118.0 | 186.3 | 2.0 | 4 |
| Group 10 | G000415 | 0.03 | 1858.9 | 225.3 | 14.0 | 4 |
| Group 11 | G000415 | 0.1 | 489.2 | 140.3 | 77.4 | 4 |
| Group 12 | G000415 | 0.3 | 156.1 | 12.6 | 92.8 | 4 |
| Group 13 | TSS | — | 2161.0 | 306.1 | — | 4 |

### Example 3. Off-Target Analysis of sgRNAs Targeted to Human SERPINA1

[0368] A biochemical assay (See, e.g., Cameron et al., Nature Methods. 6, 600-606; 2017) was used to discover potential off-target genomic sites cleaved by Cas9 targeting SERPINA1. Purified genomic DNA (gDNA) from cells were digested with in vitro assembled ribonucleoprotein (RNP) of Cas9 and sgRNA, to induce DNA cleavage at the on-target site and potential off-target sites with homology to the sgRNA spacer sequence. After gDNA digestion, the free gDNA fragment ends were ligated with adapters to facilitate edited fragment enrichment and NGS library construction. The NGS libraries were sequenced and through bioinformatic analysis, the reads were analyzed to determine the genomic coordinates of the free DNA ends. Locations in the human genome with an accumulation of reads were then annotated as potential off-target sites.

[0369] In known off-target detection assays, such as the biochemical assay used above, a large number of potential off-target sites are typically recovered, by design, so as to “cast a wide net” for potential sites that can be validated in other contexts, e.g., in a primary cell of interest. For example, the biochemical assay typically overrepresents the number of potential off-target sites as the assay utilizes purified high molecular weight genomic DNA free of the cell environment and is dependent on the dose of Cas9 ribonucleoprotein used. Accordingly, potential off-target sites identified by these assays were validated using targeted sequencing of the identified potential off-target sites.

[0370] In one approach to targeted sequencing, Cas9 and a sgRNA of interest (e.g., a sgRNA having potential off-target sites for evaluation) were introduced to PHH or PCH cells. The cells were then lysed and primers flanking the potential off-target site(s) were used to generate an amplicon for NGS analysis. Identification of indels at a certain level can be used to validate potential off-target site, whereas the lack of indels found at the potential off-target site can indicate a false positive in the off-target assay that was utilized.

[0371] Guides showing on target indel activity were tested for potential off-target genomic cleavage sites with this assay. Repair structures were manually inspected at loci with statistically relevant indel rates at the off-target cleavage sites to validate the repair structures.

[0372] No validated off-target editing activity was identified for any of guides G000409, G000414, and G000415.

### Example 4. In Vitro SERPINA1 Insertion Template Validation in Primary Mouse Hepatocytes

[0373] Primary Mouse Hepatocytes (PMH)(Gibco, Amarillo, Texas, Lot #MC837) were plated at 45,000 cells per well in 96-well Bio-Coat plates from Corning (Corning, NY, Cat #354407). Forty-eight hours after plating, LNP containing mouse albumin intron 1-targeting sgRNA with Cas9 mRNA (2:1 guide to mRNA ratio) were thawed on ice as well as AAV containing the listed insertion plasmids. LNP was diluted to 1 mg Cas9 mRNA/mL in 3% FBS William's E Media (ThermoFisher, Waltham, MA, Cat #A1217601) and 100 μL/well was administered to all experimental wells except those being “untreated” or receiving “AAV only”. The AAV preparations were diluted in 10 μL water/well to achieve a multiplicity of infection (MOI) of 5e5 for each well where AAV was administered. The cells were incubated at 37° C. for 96 hours.

[0374] After 96 hours, media was removed, fresh media was added, and cells were incubated at 37° C. After an additional 96 hours, cells plates were removed from incubator and media was collected for hAAT quantification via ELISA (Aviva Biosystems, San Diego, CA, Cat #OKIA00048). The ELISA was carried out according to manufacturer protocol. Meanwhile, the remaining cells were utilized for CellTiter Glo 2.0 Cell Viability Assay (Promega, Madison, WI, Cat #G9241) to quantify relative cell number in each well. The A1AT ELISA results were normalized to Cell Titer Glo values to correct for cell number. Results are shown in FIG. 3.

### Example 5 In Vivo Insertion of hSERPINA1 into mAlbumin Locus with Mice Expressing hSERPINA1 PIZ Transene

[0375] In vivo insertion of hSERPINA1 into mAlbumin locus was assessed in male NSG-PIZ mice expressing the hSERPINA1 PIZ variant transgene and in male wildtype NSG mice to evaluate durability of protein expression out to 6 months post insertion. NSG-PiZ mice are transgenic mice harboring multiple copies of the human SERPINA1 PiZ variant (Glu342Lys) on the immunodeficient NOD scid gamma (NSG) background. Both NSG-PiZ and wild type NSG mice are from Jackson Laboratory. The ssAAV and LNPs tested in this Example were prepared and delivered to mice as described in Example 1 to male NSG mice (Groups 1-3) and NSG-PIZ male mice (Group 4-6).

[0376] Mice were dosed with 1 mg/kg (with respect to total RNA cargo content) LNP carrying Cas9 mRNA and sgRNA G000666 (targeting mouse albumin) prepared as described above. Groups 2 and 5 were dosed additionally with ssAAV derived from Construct Nanoluc (nanoluc) at 5e11 vg/mouse. Groups 3 and 6 were dosed additionally with ssAAV derived from Construct 1 A1AT Template at 5e11 vg/mouse (Table 12). Human A1AT levels in the serum were determined by ELISA (Aviva Biosystems, Cat #OKIA00048) at one, two, and three weeks after dosing then monthly thereafter up to 6 months post-dose. This kit is specific for human A1AT and detects both PiZ variant and wild-type A1AT produced by the inserted template. Six months post-dose, the animals were euthanized, blood was collected, and serum was prepared to assess hA1AT serum levels. Serum was sent to IDEXX Laboratories for liver enzyme quantitation.

[0377] FIG. 4A and Table 13 shows hA1AT protein levels in serum at various time points as measured by ELISA. FIG. 4B shows serum ALT activity and Table 14 shows serum ALT and AST activity.

TABLE 12

| Treatment Group | Strain | AAV | Guide |
|---|---|---|---|
| Group 1 | NSG | Vehicle | Vehicle |
| Group 2 | NSG | Construct Nanoluc | G000666 |
| Group 3 | NSG | Construct 1 | G000666 |
| Group 4 | NGS-PiZ | Vehicle | Vehicle |
| Group 5 | NGS-PiZ | Construct Nanoluc | G000666 |
| Group 6 | NGS-PiZ | Construct 1 | G000666 |

TABLE 13
hA1AT levels in serum as measured by ELISA

| Treatment | Data | Week | Week | Week | Week | Week | Week | Week | Week |
|---|---|---|---|---|---|---|---|---|---|
| Group | Type | 1 | 2 | 3 | 9 | 13 | 17 | 21 | 23 |
| Group 1 | Mean (μg/ml) | 0 | 0 | 0 | 0 | 0 | 0 | 0 | 0 |
| | SD | 0 | 0 | 0 | 0 | 0 | 0 | 0 | 0 |
| | Samples (n) | 5 | 5 | 5 | 5 | 5 | 5 | 5 | 5 |
| Group 2 | Mean (μg/ml) | 0 | 0 | 0 | 0 | 0 | 0 | 0 | 0 |
| | SD | 0 | 0 | 0 | 0 | 0 | 0 | 0 | 0 |
| | Samples (n) | 5 | 5 | 5 | 5 | 5 | 5 | 5 | 5 |
| Group 3 | Mean (μg/ml) | 1585.6 | 1807.4 | 2214.1 | 2783.5 | 3368.7 | 2973.3 | 2803.9 | 2233.0 |
| | SD | 323.4 | 272.0 | 421.4 | 674.6 | 1054.1 | 732.1 | 800.5 | 479.5 |
| | Samples (n) | 5 | 5 | 5 | 5 | 5 | 5 | 5 | 5 |
| Group 4 | Mean (μg/ml) | 1999.3 | 1860.2 | 2343.9 | 2112.5 | 1336.7 | 748.9 | 813.9 | 617.2 |
| | SD | 226.8 | 399.4 | 398.4 | 519.6 | 472.0 | 420.9 | 412.4 | 209.6 |
| | Samples (n) | 5 | 5 | 5 | 5 | 5 | 5 | 5 | 5 |
| Group 5 | Mean (μg/ml) | 2180.7 | 2021.7 | 2789.8 | 2214.6 | 1142.8 | 692.6 | 674.7 | 739.5 |
| | SD | 179.7 | 218.6 | 392.4 | 850.5 | 149.8 | 206.8 | 132.4 | 82.6 |
| | Samples (n) | 5 | 5 | 5 | 5 | 5 | 5 | 5 | 5 |
| Group 6 | Mean (μg/ml) | 2771.6 | 2995.5 | 3321.0 | 4755.7 | 4217.0 | 3670.4 | 3017.7 | 3590.3 |
| | SD | 382.3 | 342.9 | 414.5 | 823.3 | 531.7 | 149.1 | 126.1 | 443.4 |
| | Samples (n) | 5 | 5 | 5 | 5 | 5 | 5 | 4* | 4* |

*one mouse was found moribund and euthanized before week 21

TABLE 14
Liver enzyme serum levels (AST and ALT)

| | | | Mean | AST | Mean | ALT |
|---|---|---|---|---|---|---|
| Group | Strain | AAV | AST | SD | ALT | SD |
| 1 | NSG | Vehicle | 83.6 | 47.5 | 46.6 | 34.1 |
| 2 | NSG | Nanoluc | 107.0 | 87.1 | 61.0 | 80.0 |
| 3 | NSG | Construct 1 | 130.6 | 102.0 | 44.4 | 47.2 |
| 4 | NSG-PiZ | Vehicle | 100.8 | 14.4 | 35.0 | 11.0 |
| 5 | NSG-PiZ | Nanoluc | 158.4 | 90.1 | 38.4 | 7.3 |
| 6 | NSG-PiZ | Construct 1 | 225.2 | 61.9 | 52.5 | 12.9 |

### Example 6—In Vivo Insertion of hSERPINA1 into the mAlbumin Locus: AAV Template Screen

[0378] Insertion of hSERPINA1 into male C57BL mouse albumin locus using seven bidirectional ssAAV constructs was tested. The ssAAV and LNPs tested in this Example were prepared and delivered to mice as described in Example 1.

[0379] Mice at 6-8 weeks of age were dosed with 1 mg/kg (with respect to total RNA cargo content) LNP carrying Cas9 mRNA and sgRNA G000666 (targeting mouse albumin). The seven ssAAV were assessed at a dose of 5e11 vg/ms (Table 15). Blood was collected at weeks one, two, and three weeks post-dose. Four weeks post dose, the animals were euthanized, liver tissue and blood were collected to assess liver editing and hA1AT expression levels in serum, respectively. Indel formation was determined by NGS. and sera was prepared to measure human alpha1 antitrypsin (hA1AT) serum expression by ELISA (Aviva Biosystems, Cat #OKIA00048). Serum hA1AT levels are shown in FIG. 5 and Table 16 at one, two, three, and four weeks post dose.

TABLE 15

| Treatment | Guide | AAV Construct | AAV dose |
|---|---|---|---|
| Group | (1 mpk) | ID | (vg/ms) |
| 1 | G000666 | Construct 1 | 5e11 |
| 2 | G000666 | Construct 2 | 5e11 |
| 3 | G000666 | Construct 7 | 5e11 |
| 4 | G000666 | Construct 3 | 5e11 |
| 5 | G000666 | Construct 10 | 5e11 |
| 6 | G000666 | Construct 5 | 5e11 |
| 7 | G000666 | Construct 9 | 5e11 |

TABLE 16

| Treatment | | Data | | | | |
|---|---|---|---|---|---|---|
| Group | AAV ID | Type | Week 1 | Week 2 | Week 3 | Week 4 |
| Group 1 | Construct 1 | Mean | 1589.5 | 2142.0 | 2233.5 | 1607.6 |
| | | (μg/ml) | | | | |
| | | SD | 359.0 | 252.4 | 637.4 | 312.4 |
| | | Samples | 5 | 5 | 5 | 5 |
| | | (n) | | | | |
| Group 2 | Construct 2 | Mean | 1202.0 | 1360.4 | 2128.4 | 2494.3 |
| | | (μg/ml) | | | | |
| | | SD | 442.2 | 486.4 | 991.6 | 10.4 |
| | | Samples | 5 | 5 | 5 | 2** |
| | | (n) | | | | |
| Group 3 | Construct 7 | Mean | 1140.0 | 1518.1 | 2285.1 | 1578.2 |
| | | (μg/ml) | | | | |
| | | SD | 320.8 | 463.9 | 686.4 | 531.2 |
| | | Samples | 5 | 5 | 5 | 5 |
| | | (n) | | | | |
| Group 4 | Construct 3 | Mean | 1181.6 | 1463.3 | 2344.5 | 1520.8 |
| | | (μg/ml) | | | | |
| | | SD | 136.5 | 231.4 | 339.5 | 352.5 |
| | | Samples | 5 | 5 | 5 | 5 |
| | | (n) | | | | |
| Group 5 | Construct 10 | Mean | 859.7 | 1104.9 | 1771.1 | 1078.6 |
| | | (μg/ml) | | | | |
| | | SD | 228.4 | 173.3 | 208.6 | 189.3 |
| | | Samples | 5 | 5 | 5 | 5 |
| | | (n) | | | | |
| Group 6 | Construct 5 | Mean | 1795.6 | 2332.1 | 3115.9 | 2291.5 |
| | | (μg/ml) | | | | |
| | | SD | 585.3 | 811.4 | 1084.3 | 639.1 |
| | | Samples | 5 | 5 | 5 | 5 |
| | | (n) | | | | |
| Group 7 | Construct 9 | Mean | 851.6 | 990.6 | 1508.9 | 1082.4 |
| | | (μg/ml) | | | | |
| | | SD | 145.5 | 483.5 | 341.3 | 507.5 |
| | | Samples | 5 | 5 | 4 | 4 |
| | | (n) | | | | |

**The day before week 4 takedown, 3 mice were found dead and 2 moribund. Blood was collected from 2 moribund animals and assayed per protocol.

### Example 7—In Vivo Insertion of hSERPINA1 into the mAlbumin Locus: Dose Response

[0380] Insertion of hSERPINA1 into male C57BL mouse albumin locus using three bidirectional ssAAV constructs was tested in a dose response assay. The ssAAV and LNPs tested in this Example were prepared and delivered to mice as described in Example 1.

[0381] Mice at 6-8 weeks of age were dosed with 1 mg/kg (with respect to total RNA cargo content) LNP carrying Cas9 mRNA and sgRNA G000666 (targeting mouse albumin). The three ssAAV derived from P00450 were assessed at three doses: 5e10, 1e11, and 5e11 vg/ms (Table 17). Blood was collected at weeks one, two, five, ten, and fourteen weeks post-dose and sera was prepared to measure human alpha1 antitrypsin (hA1AT) serum expression by ELISA (Aviva Biosystems, Cat #OKIA00048). Serum hA1AT levels are shown in FIGS. 6A-6C and Table 18 at one, two, five, ten, and fourteen (in Table 18) weeks post dose.

TABLE 17

| Treatment | Guide | AAV Construct | AAV dose |
|---|---|---|---|
| Group | (1 mpk) | ID | (vg/ms) |
| 1 | G000666 | Construct 7 | 5e10 |
| 2 | G000666 | Construct 7 | 1e11 |
| 3 | G000666 | Construct 7 | 5e11 |
| 4 | G000666 | Construct 8 | 5e10 |
| 5 | G000666 | Construct 8 | 1e11 |
| 6 | G000666 | Construct 8 | 5e11 |
| 7 | G000666 | Construct 1 | 5e10 |
| 8 | G000666 | Construct 1 | 1e11 |
| 9 | G000666 | Construct 1 | 5e11 |

TABLE 18

| Treatment | AAV ID | Data | | | | | |
|---|---|---|---|---|---|---|---|
| Group | vg/ms | Type | Week 1 | Week 2 | Week 5 | Week 10 | Week 14 |
| Group 1 | Construct 7 | Mean (μg/ml) | 572.0 | 676.7 | 934.5 | 872.6 | 1264.9 |
| | 5e10 | SD | 81.1 | 152.6 | 134.6 | 96.2 | 201.6 |
| | | Samples (n) | 5 | 5 | 4* | 4* | 4* |
| Group 2 | Construct 7 | Mean (μg/ml) | 952.2 | 1249.0 | 1728.3 | 1547.5 | 2027.5 |
| | 1e11 | SD | 299.7 | 353.0 | 493.8 | 577.1 | 583.5 |
| | | Samples (n) | 5 | 5 | 5 | 5 | 5 |
| Group 3 | Construct 7 | Mean (μg/ml) | 1848.1 | 2391.3 | 3453.1 | 3056.7 | 4836.0 |
| | 5e11 | SD | 337.9 | 476.5 | 592.5 | 653.7 | 994.1 |
| | | Samples (n) | 5 | 5 | 5 | 5 | 5 |
| Group 4 | Construct 8 | Mean (μg/ml) | 637.9 | 689.8 | 1052.3 | 983.8 | 1329.5 |
| | 5e10 | SD | 146.6 | 92.8 | 244.4 | 268.0 | 311.0 |
| | | Samples (n) | 5 | 5 | 5 | 5 | 5 |
| Group 5 | Construct 8 | Mean (μg/ml) | 1132.4 | 1092.4 | 2001.4 | 1568.5 | 1921.9 |
| | 1e11 | SD | 229.2 | 315.1 | 361.2 | 312.4 | 488.3 |
| | | Samples (n) | 5 | 5 | 4* | 4* | 4* |
| Group 6 | Construct 8 | Mean (μg/ml) | 1779.5 | 2225.6 | 2561.0 | 2766.5 | 3194.2 |
| | 5e11 | SD | 357.7 | 372.2 | 911.6 | 592.2 | 1196.3 |
| | | Samples (n) | 5 | 5 | 5 | 5 | 5 |
| Group 7 | Construct 1 | Mean (μg/ml) | 769.9 | 632.3 | 995.6 | 936.3 | 1449.3 |
| | 5e10 | SD | 344.6 | 313.8 | 377.8 | 350.8 | 409.0 |
| | | Samples (n) | 5 | 5 | 5 | 5 | 5 |
| Group 8 | Construct 1 | Mean (μg/ml) | 1964.3 | 2248.7 | 2187.2 | 2584.2 | 3459.8 |
| | 1e11 | SD | 351.4 | 521.3 | 779.6 | 473.2 | 593.7 |
| | | Samples (n) | 5 | 5 | 5 | 5 | 5 |
| Group 9 | Construct 1 | Mean (μg/ml) | 2063.0 | 2789.0 | 3421.7 | 2988.5 | 4409.3 |
| | 5e11 | SD | 434.0 | 703.7 | 1176.6 | 936.2 | 1657.4 |
| | | Samples (n) | 5 | 5 | 5 | 5 | 5 |

*mice died during bleeding in restraint device.

### Example 8—Susceptibility of SERPINA1 Open Reading Frames to Sequence Specific Nucleic Acid A2Ents

[0382] Lentiviral plasmid constructs were individually designed with single copies of the SERPINA1 open reading frames, each corresponding to the various gene of interest (GOI) sequences from insertion constructs Construct 1, Construct 7, and Construct 8. The lentiviral vectors contain EF1a promoters to drive GOI expression, and puromycin resistance for selection.

[0383] The designs were based on the insertion constructs shown in Table 19:

TABLE 19

| | | Component of |
|---|---|---|
| Lentivirus | | insertion |
| construct | Description | constructs |
| Construct 20 | SERPINA1 w/native signal sequence | None |
| Construct 21 | SERPINA1, no signal sequence | Construct 1 |
| Construct 22 | SERPINA1, no signal sequence, CpG | Construct 7 |
| | depleted | |
| Construct 23 | SERPINA1, no signal sequence, CpG | Construct 7, |
| | depleted, alternative codon usage 1 | Construct 8 |
| Construct 24 | SERPINA1, no signal sequence, CpG | Construct 8 |
| | depleted, alternative codon usage 2 | |

Upon sequencing, the lentiviral constructs, changes from the designed constructs were identified in Construct 23. Specifically, rather than having three mismatches from the targeting sequence of G000409, there was only one mismatch. The changes from the designs did not result in a change in the encoded amino acid sequence. The alignment of the targeting sequence of G000409, the wild type sequence of SERPINA1, the Construct 20, and Construct 7/8 is shown, with the differences from the G000409 targeting site underlined:

| | |
|---|---|
| G000409 | ACTCACGATGAAATCCTGGA (SEQ ID NO: 1567) |
| Con 20 | ACTCATGATGAAATCCTGGA (SEQ ID NO: 1568) |
| Con 7/8 | ACCCATGATGAGATCCTGGA (SEQ ID NO: 1569) |
| | ** ** ***** ******** |

Sequence specific nucleic acid agents shown in Table 20 were tested in the experiment:

TABLE 20
Nucleic Acid Agents

| | Target sequence | |
|---|---|---|
| Name | SEQ ID NO: 703. | SEQ ID NO: |
| siRNA2 | 1405-1425 | 980 (sense) 982 (antisense) |
| siRNA3 | 957-977 | 981 (sense) 984 (antisense) |
| G000409 | 506-525 | 1129 |
| G000414 | 538-557 | 1130 |
| G000415 | 413-431 | 1131 |

[0384] Hepa1.6 mouse hepatoma cells (ATCC, Manassas, VA, Cat #CRL-1380) were plated at 250,000 cells/well in 6-well dishes (Thermo Fisher, Waltham, MA, Cat #140675) with DMEM media (Millipore Sigma, Burlington, MA, Cat #D5796) and 10% Fetal Bovine Serum and incubated at 37° C. After 24 hrs, lentivirus was administered to the cells at an MOI of 6 (assuming a doubling of cells after 24 hr to total cell number in each well equaling 500,000 cells) to enable integration and expression of the lentiviral gene constructs.

[0385] After 24 hrs, transduced and control cells were treated with LNP containing shRNA (final concentration 10 nM shRNA per well) or sgRNA/Cas9 mRNA (1:2 ratio, at 3 μg total RNA/well) targeting wild-type SERPINA1 and returned to 37° C. incubation.

[0386] Forty-eight hours after treatment with the LNP, RNA was harvested using Qiagen RNAeasy Mini Kit (Hilden, Germany, Cat #74104) and converted to cDNA using High-Capacity RNA-to-cDNA Kit (Thermo Fisher, Waltham, MA, Cat #4388950), both per manufacturer's protocols.

[0387] Droplet digital PCR (ddPCR) primer-probe sets were designed to detect the transcripts resulting from expression of each lentiviral construct (Bio-Rad, Hercules, CA, Cat #10031277). A control primer-probe set to detect mouse beta-actin expression was also ordered from Bio-Rad (Cat #10031256). The cDNA samples were analyzed with the appropriate primer-probe sets via ddPCR according to manufacturer protocols.

[0388] For experiments involving cDNA quantification, 1:10,000 dilutions of cDNA (generated in 20 μL reaction with 1 μg RNA input) were performed in water. Bio-Rad ddPCR Supermix for Probes (No dUTP, Cat #1863024) was thawed on ice. 20 μL reactions were generated for each sample (10 μL Supermix+7 μL water+1 μL 10,000× diluted cDNA+1 μL SERPINA1 probeset+1 μL control gene probeset) and arrayed in 96-well plates (Bio-Rad Cat #12001925).

[0389] Droplets were generated using a Bio-Rad Automated Droplet Generator (Cat #1864101) per manufacturer protocols. Droplets generated with this machine were then thermocycled with the following manufacturer conditions, using an Applied Biosystems VeritiPro Thermal Cycler (Cat #A48141) (Table 21).

TABLE 21
Thermocyclin conditions

| | | | |
|---|---|---|---|
| Cycling | Temperature | | Number |
| Step | ° C. | Time | of Cycles |

| [symbol] ONE [symbol] | | | 2 [symbol] | 3 | min | 1 |
|---|---|---|---|---|---|---|
| [symbol] | | | [symbol] | 10 | min | 1 |
| [symbol] | | | [symbol] | [symbol] | | 40 |
| [symbol] | | | [symbol] | 1 [symbol] | | 40 |
| [symbol] | | | [symbol] | 10 | min | 1 |
| | [symbol] | [symbol] | 4 | [symbol] | | 1 |
| | [symbol] | [symbol] | 2 [symbol] | 1 | min | 1 |

[symbol]

[symbol]

indicates data missing or illegible when filed

[0390] After thermocycling, ddPCR samples were loaded onto the Bio-Rad QX200 Droplet Reader (Cat #184003) and samples were analyzed as gene expression “GEX” assay. The reader generated results for each sample, providing concentration (copies/μL) of each target, SERPINA1 and control gene).

[0391] Concentration of SERPINA1 transcript for each sample was determined and normalized to the concentration of mouse beta-actin to correct for cell-number variation. Normalized values were then compared to non-treated control samples to determine relative reduction of transcript after shRNA or CRISPR-KO treatment, with a value of 1 being indicative of 100% reduction of SERPINA1 mRNA level and 0 being indicative of no reduction of SERPINA1 mRNA level. Table 22 shows percent reduction of hSERPINA1 transcript compared to non-targeting control. Each sample was treated first with lentiviral vector (indicated by row in table) and then with LNP containing shRNA or CRISPR sgRNA (indicated by column in table).

TABLE 22
Percent reduction of hSERPINA1 transcript compared to non-targeting control.

| Primary | Secondary Treatment | | | | | |
|---|---|---|---|---|---|---|
| Treatment | Non- | | | | | |
| Lentiviral | targeting | | | | | |
| Construct | LNP | siRNA2 | siRNA3 | G000409 | G000414 | G000415 |
| Construct 20 | 0 | 0.87 | 0.83 | 0.72 | 0.72 | 0.55 |
| Construct 21 | 0 | 0.69 | 0.62 | 0.69 | 0.30 | −0.10 |
| Construct 22 | 0 | 0.10 | −0.18 | 0.38 | 0.07 | −0.29 |
| Construct 23 | 0 | 0.14 | −0.53 | 0.41 | −0.04 | −0.61 |
| Construct 24 | 0 | 0.03 | −0.02 | 0.00 | −0.30 | −0.05 |

### Example 9—In Vivo Insertion of hSERPINA1 into the Cynomolgus Albumin Locus Followed by In Vivo Knockdown of cSERPINA1 Transgene

AAV Preparation for Delivery hSERPINA1

[0392] Triple transfection of suspension Viral Production cells (Thermo Fisher, Cat #A35347) was used to package genomes with genes of interest (GOI) for AAV8 using routine methods production. Three days post transfection, AAV vectors were harvested from cell culture via cell lysis including Benzonase treatment to digest plasmid, host cell, and any other free DNA and RNA. Harvest material were then clarified by depth filtration to remove any cell debris and large molecules followed by a tangential flow filtration for removal of small molecules, buffer exchange, and volume reduction. AAV vectors were subsequently purified through an affinity chromatography, and full AAV particles (assessed by the ratio of genome titer to capsid titer) were enriched by an anion-exchange chromatography. At last, purified AAV vectors were buffer exchanged and concentrated into the final formulation buffer (PBS with 0.001% Pluronic F68, pH7.4) using centrifugation filter units. A panel of 12 tests was provided for each batch of production including a ddPCR using primers/probe located within the ITR region for genome titer determination.

Cynomolgus and Human Alpha 1-Antitrypsin (hA1AT) LC-MS/MS Analysis from Cynomolgus Serum

[0393] For in vivo studies, blood was collected, and the serum was isolated as indicated. The total cA1AT and hA1AT levels were determined using liquid chromatography-tandem mass spectrometry (LC-MS/MS). Purified lyophilized native hA1AT derived from human plasma was obtained from Athens Research & Technology. Purified lyophilized native cA1AT derived from cynomolgus serum was made internally. Lyophilized cA1AT and hA1AT were dissolved in fetal calf serum at the appropriate concentration for standards and quality controls. Serum samples were diluted 10-fold into fetal calf serum. 5 μL of 1900 ng/mL stable labeled internal standards were added to 5 μL of the fetal calf serum diluted samples, standards, and quality controls. Samples were then denatured with 25 μL trifluoroethanol, diluted with 25 μL 50 mM ammonium bicarbonate immediately before 5 μL of 200 mM DTT was added and incubated for 30 min at 55° C. The reduced samples were treated with 10 μL of 200 mM iodacetamide and incubated for one hour at room temperature in the dark with shaking. The samples were diluted with 400 μL of 50 mM ammonium bicarbonate:Methol (65:35) and treated with 20 μL of 1 μg/L trypsin, and incubated overnight at 37° C. Digestion was terminated with 10 μL of formic acid.

Identification of Wild-Type cA1AT and hA1AT Peptides

[0394] The pure A1AT digest was analyzed by LC-MS/MS and signature peptides that contained the wild-type alleles were identified. Specifically, the wild-type cA1AT was detected using heavy labeled specific peptide (SANLHLPR; SEQ ID NO: 1559), and the wild-type hA1AT was detected using a different heavy labeled wild-type specific peptide (SASLHLPK; SEQ ID NO: 1560). The combined wild-type cA1AT and hA1AT concentration was detected using a third heavy labeled peptide (AVLTIDEK; SEQ ID NO: 1561). Each of these peptides were synthesized by incorporation of a single 13C615N-leucine at the position noted by bold underline.

Determining Levels of Serum cA1AT and hA1AT Using Mass Spectrometry Serum was digested according to the methods described above. After digestion, the digested serum was loaded onto the column and analyzed by LC-MS/MS as described below. Identification of wild-type cA1AT and hA1AT levels were obtained by comparison to calibration curves.

### LC-MS/MS Conditions

[0395] LC-MS/MS analysis was performed with a 2.1×50 mm C8 column. Mobile phase A consisted of 0.10% formic acid in water and mobile phase B consisted of 0.10% formic acid in acetonitrile. A needle wash consisted of 0.1% Formic Acid, 1% dimethylsulfoxide in Methanol: Water (35:65). Analysis of the A1AT digest was performed on a mass spectrometer with the following parameters: (a) Ion Source: Turbo Spray IonDrive; (b) Curtain Gas: 35.0; (c) Collision Gas: Medium; (d) IonSpray Voltage: 5500; (e) Temperature: 500° C.; (f) Ion Source Gas 1: 50; and (g) Ion Source Gas 2: 50.

In Vivo Insertion of hSERPINA1 into the Cynomolgus Albumin Locus Followed by In Vivo Knockdown of cSERPINA1 Transgene

[0396] A human SERPINA1 bidirectional construct (Construct 1) in an AAV8 expression vector (AAV8-SERPINA1) combination with a formulated sgRNA cross-reactive with the human and cynomolgus albumin genes (G009860) was evaluated for human SERPINA1 gene insertion in male cynomolgus monkeys. The target site of the human albumin sgRNA is conserved in cynomolgus monkeys, allowing for the human SERPINA1 transgene to be inserted into the cynomolgus monkey albumin locus. Following insertion of the human SERPINA1 gene, a guide specific to cynomolgus SERPINA1 (G014418) was evaluated for cynomolgus (c)SERPINA1 gene knockout was assessed by detection of serum cynomolgus (c)A1AT as a marker of gene editing. The guides used are shown in the table below.

TABLE 23
sgRNAs

| | Target | Unmodified | Modified |
|---|---|---|---|
| sgRNA | sequence | guide | guide |
| G009860 | UAAAGCAUAG | UAAAGCAUAGUGCA | mU*mA*mA*AG |
| (human/ | UGCAAUGGAU | AUGGAUGUUUUAGA | CAUAGUGCAAU |
| cyno) | (SEQ ID | GCUAGAAAUAGCAA | GGAUGUUUUAG |
| | NO: 8) | GUUAAAAUAAGGCU | AmGmCmUmAmG |
| | | AGUCCGUUAUCAAC | mAmAmAmUmAm |
| | | UUGAAAAAGUGGCA | GmCAAGUUAAA |
| | | CCGAGUCGGUGCUU | AUAAGGCUAGU |
| | | UU | CCGUUAUCAmA |
| | | (SEQ ID | mCmUmUmGmAm |
| | | NO: 1500 | AmAmAmAmGmU |
| | | | mGmGmCmAmCm |
| | | | CmGmAmGmUmC |
| | | | mGmGmUmGmCm |
| | | | U*mU*mU*mU |
| | | | (SEQ ID |
| | | | NO: 72) |
| G014418 | AGACCUUAGU | AGACCUUAGUGAUA | mA*mG*mA*CC |
| (cyno | GAUACCCAGG | CCCAGGGUUUUAGA | UUAGUGAUACC |
| specific) | (SEQ ID | GCUAGAAAUAGCAA | CAGGGUUUUAG |
| | NO: 1502) | GUUAAAAUAAGGCU | AmGmCmUmAmG |
| | | AGUCCGUUAUCAAC | mAmAmAmUmAm |
| | | UUGAAAAAGUGGCA | GmCAAGUUAAA |
| | | CCGAGUCGGUGCUU | AUAAGGCUAGU |
| | | UU | CCGUUAUCAmA |
| | | (SEQ ID | mCmUmUmGmAm |
| | | NO: 1504) | AmAmAmAmGmU |
| | | | mGmGmCmAmCm |
| | | | CmGmAmGmUmC |
| | | | mGmGmUmGmCm |
| | | | U*mU*mU*mU |
| | | | (SEQ ID |
| | | | NO: 1506) |

[0397] Monkeys (n=3) were dosed intravenously with a bolus dose of AAV8-SERPINA1 (1.5E13 vg/kg) followed by a 30-minute IV infusion of G009860 formulated in an LNP with Cas9 mRNA as provided above (3.0 mg/kg) on study day 1. On study day 245, monkeys were dosed a 30-min IV infusion of the cynomolgus specific SERPINA1 guide G014418 formulated in an LNP with Cas9 mRNA as provided above (3.0 mg/kg). On study day 1 a vehicle control group (n=3) was dosed with a bolus dose of AAV buffer followed by a 30-minute infusion of LNP buffer. On study day 245, the vehicle control group was dosed with a 30-minute infusion of LNP buffer. All monkeys were pre-treated with a bolus dose of 2 mg/kg dexamethasone 1 hour prior to the AAV bolus on study day 1, and 1-hour prior to LNP infusion on study day 245. The AAV and LNPs tested in this study were prepared as described in the materials and methods. Serum cA1AT/hA1AT levels and gene editing were measured as described in the materials and methods.

[0398] All animals were prescreened for single-nucleotide variants in the sgRNA target sequence and for pre-existing anti-AAV8 neutralizing antibodies. Pharmacokinetic evaluation of AAV and LNP components in plasma were within historical ranges for all treated animals indicating successful dosing of all products. Clinical pathology (clinical chemistry, hematology, coagulation) and cytokine monitoring did not yield any unusual findings with any parameter elevations returning to baseline within one week.

[0399] Animals treated with AAV8-SERPINA1 and formulated G009860 expressed increased level of serum hA1AT (Table 24 and FIGS. 9A and 9B) while no hA1AT expression was observed in the buffer control group. Animals treated with the formulated G009860 had an average % Indel of 44.2 while none was observed for the buffer control group (Table 25 and FIG. 7). hA1AT levels reached maximal plateau at week 4 and were maintained through week 52 at an average steady-state level of 1126 μg/mL, as modeled with nonlinear fitting one-phase association. No change in human hA1AT was observed following knockout treatment with formulated G014418 on day 259 (Table 27 and FIG. 8).

[0400] Following cA1AT knockout treatment on day 245, animals treated with formulated G014418 expressed decreased level of serum cA1AT while no change in expression was observed in the buffer control group (Table 26 and FIGS. 9A and 9B). Animals treated with formulated G014418 had an average % Indel of 44.0 while none was observed for the buffer control group (Table 27 and FIG. 8). cA1AT levels were maintained at 2005 μg/mL prior to knockout treatment, after which maximal cA1AT reduction was observed in 4 weeks and maintained through week 52 at an average steady-state level of 652 μg/mL, as modeled with nonlinear fitting plateau followed by one phase decay. No change in hA1AT was observed following cA1AT knockout treatment.

TABLE 24
hA1AT levels in serum

| | hA1AT Serum Concentration (μg/mL) in NHP | |
|---|---|---|
| Study | measured by SASLHLPK (SEQ ID NO: 1560) | |
| Day | Vehicle Control | Insertion Treatment |

| Label | 1001 | 1002 | 1003 | 2001 | 2002 | 3003 |
|---|---|---|---|---|---|---|
| D-10 | BQL | BQL | BQL | BQL | BQL | BQL |
| D-7 | BQL | BQL | BQL | BQL | BQL | BQL |
| D-5 | BQL | BQL | BQL | BQL | BQL | BQL |
| D1 | BQL | BQL | BQL | BQL | BQL | BQL |
| D7 | BQL | BQL | BQL | 384 | 158 | 305 |
| D14 | BQL | BQL | BQL | 635 | 429 | 772 |
| D28 | BQL | BQL | BQL | 1030 | 819 | 1100 |
| D42 | BQL | BQL | BQL | 1270 | 922 | 1470 |
| D56 | BQL | BQL | BQL | 1120 | 816 | 1090 |
| D70 | BQL | BQL | BQL | 1110 | 867 | 800 |
| D78 | BQL | BQL | BQL | 1260 | 804 | 1370 |
| D84 | BQL | BQL | BQL | 1345 | 849 | 1670 |
| D98 | BQL | BQL | BQL | 1285 | 935 | 1700 |
| D112 | BQL | BQL | BQL | 1290 | 858 | 1640 |
| D126 | BQL | BQL | BQL | 1345 | 848 | 1845 |
| D140 | BQL | BQL | BQL | 922 | 692 | 1240 |
| D154 | BQL | BQL | BQL | 973 | 691 | 1260 |
| D168 | BQL | BQL | BQL | 981 | 674 | 1360 |
| D182 | BQL | BQL | BQL | 1040 | 634 | 1150 |
| D196 | BQL | BQL | BQL | 1030 | 767 | 1250 |
| D210 | BQL | BQL | BQL | 911 | 564 | 1090 |
| D224 | NR | NR | BQL | 1350 | 889 | 1670 |
| D238 | BQL | BQL | BQL | 1140 | 780 | 1260 |
| D252 | BQL | BQL | BQL | 1080 | 779 | 1160 |
| D258 | BQL | BQL | BQL | 1160 | 738 | 1220 |
| D266 | BQL | BQL | BQL | 1060 | 752 | 1330 |
| D272 | BQL | BQL | BQL | 1110 | 632 | 1050 |
| D280 | BQL | BQL | BQL | 1300 | 857 | 1470 |
| D294 | BQL | BQL | BQL | 1390 | 860 | 1500 |
| D308 | BQL | BQL | BQL | 1230 | 699 | 1510 |
| D322 | BQL | BQL | BQL | 1300 | 800 | 1450 |
| D336 | BQL | BQL | BQL | 1280 | 785 | 1550 |
| D350 | BQL | BQL | BQL | 1420 | 906 | 1300 |
| D364 | BQL | BQL | BQL | 1310 | 821 | 1560 |

BQL: Below Quantitation Limit, NR: Not reported due to analytical issue.

TABLE 25
Editing at Cynomolgus Albumin Locus from Day 14 Liver Biopsy

| | Mean | | |
|---|---|---|---|
| Condition | % Indel | SD | Samples |
| Vehicle Control | <1 | | 3 |
| Insertion Treatment | 44.2 | 11.5 | 3 |

TABLE 26
cA1AT levels in serum

| | cA1AT Serum Concentration (μg/mL) in NHP | |
|---|---|---|
| Study | measured by SANLHLPR (SEQ ID NO: 1559) | |
| Day | Vehicle Control | Insertion Treatment |

| Label | 1001 | 1002 | 1003 | 2001 | 2002 | 3003 |
|---|---|---|---|---|---|---|
| D-10 | 2050 | 2100 | 2370 | 1870 | 1080 | 2170 |
| D-7 | 2140 | 2020 | 2460 | 1810 | NR | 2260 |
| D-5 | 2320 | 2190 | 2400 | 1880 | 1100 | 2110 |
| D1 | 2710 | 2620 | 2890 | 2430 | 1310 | 2490 |
| D7 | 2540 | 2100 | 2290 | 2120 | 1050 | 2250 |
| D14 | 2530 | 2350 | 2490 | 1900 | 1220 | 2350 |
| D28 | 2120 | 2100 | 2200 | 2200 | 1230 | 2260 |
| D42 | 2290 | 2180 | 2800 | 2320 | 1260 | 2420 |
| D56 | 1910 | 2060 | 2370 | 2280 | 1190 | 1870 |
| D70 | 1790 | 1900 | 1900 | 1380 | 1110 | 1990 |
| D78 | 1820 | 1710 | 1710 | 1510 | 1130 | 2040 |
| D84 | 2175 | 2220 | 2260 | 2095 | 1165 | 2415 |
| D98 | 2130 | 1945 | 2085 | 2065 | 1270 | 2415 |
| D112 | 2225 | 2080 | 2385 | 2310 | 1320 | 2310 |
| D126 | 2430 | 2315 | 2340 | 2375 | 1195 | 2480 |
| D140 | 2890 | 2800 | 2740 | 2970 | 1430 | 2630 |
| D154 | 2940 | 2820 | 2770 | 2610 | 1520 | 2860 |
| D168 | 3000 | 2670 | 2930 | 2980 | 1530 | 2900 |
| D182 | 3110 | 2710 | 2930 | 2750 | 1410 | 2840 |
| D196 | 3330 | 2860 | 2970 | 2770 | 1490 | 2920 |
| D210 | 2890 | 2950 | 2980 | 2500 | 1450 | 2780 |
| D224 | NR | NR | 2790 | 2330 | 1430 | 2830 |
| D238 | 2450 | 2300 | 2710 | 2340 | 1320 | 2590 |
| D252 | 2450 | 2440 | 2940 | 1540 | 1330 | 1710 |
| D258 | 2350 | 2360 | 2650 | 878 | 1100 | 1150 |
| D266 | 2630 | 2420 | 2790 | 519 | 1210 | 762 |
| D272 | 2420 | 2030 | 2560 | 487 | 1100 | 631 |
| D280 | 2600 | 2470 | 2680 | 472 | 1100 | 536 |
| D294 | 2630 | 2430 | 2700 | 439 | 1000 | 588 |
| D308 | 2340 | 2430 | 2540 | 446 | 943 | 644 |
| D322 | 2520 | 2550 | 2620 | 411 | 1010 | 545 |
| D336 | 2390 | 2540 | 2630 | 410 | 1030 | 533 |
| D350 | 2690 | 2390 | 2640 | 428 | 1060 | 525 |
| D364 | 2610 | 2310 | 2490 | 428 | 1050 | 512 |

NR: Not reported due to analytical issue.

TABLE 27
Editing at Cynomolgus SERPINA1
Locus from day 259 Liver Biopsy

| | Mean | | |
|---|---|---|---|
| Condition | % Indel | SD | Samples |
| Vehicle Control | <1 | | 3 |
| Insertion Treatment | 44.0 | 17.7 | 3 |

### Example 10—In Vivo Insertion of hSERPINA1 into the Cynomolgus Albumin

[0401] AAVs with unique hSERPINA1 sequences (Construct 7 and Construct 8) in combination with the formulated albumin guide G009860 were evaluated for human SERPINA1 gene insertion in male cynomolgus monkeys as provided above.

[0402] Two groups of monkeys (n=4/group, 2 male and 2 female) were dosed intravenously with a bolus dose of AAV8 (1.5E13 vg/kg with either Construct 7 or Construct 8 hSERPINA1 sequences) followed by a 30-minute IV infusion of the formulated albumin guide G009860 (3.0 mg/kg). A vehicle control group (n=2, 1 male and 1 female) was dosed with a bolus dose of AAV buffer followed by a 30-minute infusion of LNP buffer. All monkeys were pre-treated with a bolus dose of 2 mg/kg dexamethasone 1 hour prior to the AAV bolus. The AAV and LNPs tested in this study were prepared as described in the materials and methods. Serum cA1AT/hA1AT levels and gene editing were measured as described in the materials and methods.

[0403] All animals were prescreened for single-nucleotide variants in the sgRNA target sequence and for pre-existing anti-AAV8 neutralizing antibodies. Pharmacokinetic evaluation of AAV and LNP components in plasma were within historical ranges for all treated animals except for the AAV component in animal 3502. Study documents for animal 3502 noted a mis-dose during AAV administration. Plasma exposures for AAV in animal 3502 were 10× lower than historical ranges indicating a dosing issue. Taking these considerations into account, animal 3502 was excluded from efficacy assessments. Clinical pathology (clinical chemistry, hematology, coagulation) and cytokine monitoring did not yield any usual findings with any parameter elevations returning to baseline within one week.

[0404] Animals treated with AAV containing Construct 7 or Construct 8 and the formulated albumin guide G009860 expressed increased levels of serum hA1AT while no expression was observed in the buffer control group (Table 28 and FIG. 11). Animals treated with the formulated albumin guide G009860 had an average % Indel of 37.6 in the Construct 7 group and 42.2 in the Construct 8 group. No indels were observed for the buffer control group (Table 29 and FIG. 10). hA1AT levels reached maximal plateau at week 4 with an average of 882 μg/mL in the Construct 7 group and an average of 1223 μg/mL in the Construct 8 group. cA1AT levels were unaffected by either insertion treatment (Table 30).

TABLE 28
hA1AT levels in serum

| | hA1AT Serum Concentration (μg/mL) in NHP | | | | | | | | | |
|---|---|---|---|---|---|---|---|---|---|---|
| | measured by SASLHLPK (SEQ ID NO: 1560) | | | | | | | | | |
| Study | Vehicle | | | | | | | | | |
| Day | Control | | Construct 7 | | | | Construct 8 | | | |
| Label | 1001 | 1002 | 2001 | 2002 | 2501 | 2502 | 3001 | 3002 | 3501 | 3502 |
| D-12 | BQL | BQL | BQL | BQL | BQL | BQL | BQL | BQL | BQL | Excl. |
| D-7 | BQL | BQL | BQL | BQL | BQL | BQL | BQL | BQL | BQL | Excl. |
| D-2 | BQL | BQL | BQL | BQL | BQL | BQL | BQL | BQL | BQL | Excl. |
| D8 | NR | NR | 437 | 459 | 290 | 389 | 458 | 486 | 514 | Excl. |
| D14 | BQL | BQL | 547 | 841 | 613 | 878 | 996 | 928 | 962 | Excl. |
| D28 | BQL | BQL | 648 | 937 | 863 | 1080 | 1520 | 1120 | 1030 | Excl. |

BQL: Below Quantitation Limit,
NR: Not reported due to analytical issue.,
Excl.: Values Excluded

TABLE 29
Editing at Cynomolgus Albumin Locus from day 14 Liver Biopsy

| | Mean | | |
|---|---|---|---|
| AAV | % Indel | SD | Samples |
| Vehicle Control | <1 | | 2 |
| Construct 7 | 37.6 | 6.3 | 4 |
| Construct 8 | 42.2 | 1.5 | 3 |

TABLE 30
cA1AT levels in serum

| | cA1AT Serum Concentration (μg/mL) in NHP | | | | | | | | | |
|---|---|---|---|---|---|---|---|---|---|---|
| | measured by SANLHLPR (SEQ ID NO: 1559) | | | | | | | | | |
| Study | Vehicle | | | | | | | | | |
| Day | Control | | Construct 7 | | | | Construct 8 | | | |
| Label | 1001 | 1002 | 2001 | 2002 | 2501 | 2502 | 3001 | 3002 | 3501 | 3502 |
| D-12 | 2240 | 2250 | 2090 | 3010 | 2220 | 2430 | 2590 | 2220 | 922 | Excl. |
| D-7 | 2430 | 2400 | 2150 | 2590 | 1540 | 2270 | 2860 | 2290 | 1030 | Excl. |
| D-2 | 2270 | 2600 | 2230 | 2600 | 2490 | 2700 | 2420 | 2190 | 1040 | Excl. |
| D8 | NR | NR | 2730 | 3240 | 2710 | 3050 | 2830 | 2690 | 1210 | Excl. |
| D14 | 2410 | 2710 | 2470 | 3220 | 2590 | 3140 | 2870 | 2330 | 1390 | Excl. |
| D28 | 2000 | 2790 | 2230 | 2800 | 2720 | 2780 | 2610 | 2030 | 1670 | Excl. |

NR: Not reported due to analytical issue.,
Excl: Values Excluded

### Example 11—Evaluation of Serum hA1AT for Neutrophil Elastase Inhibition

[0405] Neutrophil elastase inhibition activity of native human A1AT was compared to activity of hA1AT sequence that is expressed from the bidirectional construct in SerpinA1 null mice. The hA1AT protein expressed from the bidirectional construct after insertion into the albumin locus contains 3 amino acids at the N-terminus from human albumin insertion site that are not present in the native human A1AT protein.

[0406] mRNAs encoding native human A1AT (native-A1AT) or the human A1AT expressed from the bidirectional construct after insertion into the albumin locus (Alb-A1AT) were lipid formulated and delivered intravenously at a dose of 2 mg/kg to SerpinA1 null mice (Jackson Laboratories, n=4 per group). Six hours after administration, blood was collected and serum was prepared for quantification of human A1AT by ELISA (Aviva Biosystems, Cat #OKIA00048), and inhibition of neutrophil elastase as compared to control null mice not treated with mRNA encoding an A1AT, and wild type mice expressing endogenous A1AT.

[0407] Expression of A1AT from the expression constructs as determined by ELISA is shown in FIG. 12A and in Table 31.

TABLE 31
Expression of A1AT from in SerpinA1 null mice

| | |
|---|---|
| Alb-A1AT | Native-A1AT |

| Average | | | Average | | |
|---|---|---|---|---|---|
| hA1AT | SD hA1AT | | hA1AT | SD hA1AT | |
| (μg/mL) | (μg/mL) | N | (μg/mL) | (μg/mL) | N |
| 112.73 | 34.99 | 4 | 131.02 | 17.15 | 4 |

[0408] The commercially available Neutrophil Elastase Colorimetric Drug Discovery Kit (Cat #: BLM-AK947; Enzo Life Sciences Inc., Farmingdale, NY), was employed to determine the ability of serum A1AT to inhibit neutrophil elastase. Serum from in vivo studies was prepared to enable accurate evaluation of A1AT. Serum samples were diluted 3× in PBS and filtered through a 0.22 μm spin filter (Cat #UFC30GV; Sigma). Two-hundred microliters of Alpha 1 Select Resin (Cat #17547201; Cytiva, Marlborough, MA) was added into an empty column (Cat #731-1550; BioRad) and washed three times with 600 μL of PBS. 600 μL of the filtered A1AT-containing serum sample was introduced to the column and incubated with rotation for 40 minutes at room temperature. Columns were washed three times with PBS and A1AT protein was eluted by adding 500 μL of elution buffer (2M MgCl2, 20 mM Tris pH7.5).

[0409] Purified samples were then employed in the neutrophil elastase inhibition assay performed according to manufacturer's protocol. Briefly, kit components were thawed on ice and inhibitors and substrates were diluted to working stock concentrations. Neutrophil elastase enzyme and elastatinal inhibitor control were diluted in assay buffer and added to appropriate wells of a microplate. Purified serum samples were diluted at various concentrations. The plate was incubated for 30 minutes at 37° C. to allow inhibitor/enzyme interaction. Colorimetric substrate was then introduced, and the plates were read on a plate reader at A_{405 nm} at 1 minute time interval for 10 minutes. To determine percent inhibition of purified serum samples, the standard values were plotted as mOD versus time and the range of time points during which the reaction was linear were determined. The rection velocity (mOD/min) was determined and the slope of a line fit to the linear portion of the data plot was defined. The percent inhibition is shown in Table 32 and FIG. 12B

TABLE 32
Percent inhibition of Neutrophil Elastase in purified serum samples

| Sample | Average % Inhibition | SD % Inhibition | N |
|---|---|---|---|
| Alb-A1AT | 21.27 | 5.07 | 5 |
| native A1AT | 22.28 | 0.79 | 5 |
| WT Mice | 95.56 | 1.62 | 4 |
| Null Mice (Control) | 17.25 | 0 | 1 |
| 125 μg/mL inhibitor | 88.22 | 0 | 1 |
| (Elastatinal) (Control) | | | |

Alb-A1AT
(SEQ ID NO: 1562)
GGGAAGCUCAGAAUAAACGCUCAACUUUGGCCGGAUCUGGCGCGCCAC
CAUGAAGUGGGUAACCUUUAUUUCCCUUCUUUUUCUCUUUAGCUCGGC
UUAUUCCAGGGGUGUGUUUCGUCGAGAUGCACUUGAGGAUCCCCAGGG
AGAUGCUGCCCAGAAGACAGAUACAUCCCACCAUGAUCAGGAUCACCC
AACCUUCAACAAGAUCACCCCCAACCUGGCUGAGUUCGCCUUCAGCCU
AUACCGCCAGCUGGCACACCAGUCCAACAGCACCAAUAUCUUCUUCUC
CCCAGUGAGCAUCGCUACAGCCUUUGCAAUGCUCUCCCUGGGGACCAA
GGCUGACACUCACGAUGAAAUCCUGGAGGGCCUGAAUUUCAACCUCAC
GGAGAUUCCGGAGGCUCAGAUCCAUGAAGGCUUCCAGGAACUCCUCCG
UACCCUCAACCAGCCAGACAGCCAGCUCCAGCUGACCACCGGCAAUGG
CCUGUUCCUCAGCGAGGGCCUGAAGCUAGUGGAUAAGUUUUUGGAGGA
UGUUAAAAAGUUGUACCACUCAGAAGCCUUCACUGUCAACUUCGGGGA
CACCGAAGAGGCCAAGAAACAGAUCAACGAUUACGUGGAGAAGGGUAC
UCAAGGGAAAAUUGUGGAUUUGGUCAAGGAGCUUGACAGAGACACAGU
UUUUGCUCUGGUGAAUUACAUCUUCUUUAAAGGCAAAUGGGAGAGACC
CUUUGAAGUCAAGGACACCGAGGAAGAGGACUUCCACGUGGACCAGGU
GACCACCGUGAAGGUGCCUAUGAUGAAGCGUUUAGGCAUGUUUAACAU
CCAGCACUGUAAGAAGCUGUCCAGCUGGGUGCUGCUGAUGAAAUACCU
GGGCAAUGCCACCGCCAUCUUCUUCCUGCCUGAUGAGGGGAAACUACA
GCACCUGGAAAAUGAACUCACCCACGAUAUCAUCACCAAGUUCCUGGA
AAAUGAAGACAGAAGGUCUGCCAGCUUACAUUUACCCAAACUGUCCAU
UACUGGAACCUAUGAUCUGAAGAGCGUCCUGGGUCAACUGGGCAUCAC
UAAGGUCUUCAGCAAUGGGGCUGACCUCUCCGGGGUCACAGAGGAGGC
ACCCCUGAAGCUCUCCAAGGCCGUGCAUAAGGCUGUGCUGACCAUCGA
CGAGAAAGGGACUGAAGCUGCUGGGGCCAUGUUUUUAGAGGCCAUACC
CAUGUCUAUCCCCCCCGAGGUCAAGUUCAACAAACCCUUUGUCUUCUU
AAUGAUUGAACAAAAUACCAAGUCUCCCCUCUUCAUGGGAAAAGUGGU
GAAUCCCACCCAAAAAUAAUAGGCUAGCCACCAGCCUCAAGAACACCC
GAAUGGAGUCUCUAAGCUACAUAAUACCAACUUACACUUUACAAAAUG
UUGUCCCCCAAAAUGUAGCCAUUCGUAUCUGCUCCUAAUAAAAAGAAA
GUUUCUUCACAUUCUCUCGAGAAAAAAAAAAAAUGGAAAAAAAAAAAA
CGGAAAAAAAAAAAGGUAAAAAAAAAAAAUAUAAAAAAAAAAACAUAA
AAAAAAAAAACGAAAAAAAAAAAACGUAAAAAAAAAAAACUCAAAAAA
AAAAAGAUAAAAAAAAAAAACCUAAAAAAAAAAAAUGUAAAAAAAAAA
AAGGGAAAAAAAAAAACGCAAAAAAAAAAAACACAAAAAAAAAAAAUG
CAAAAAAAAAAAAUCGAAAAAAAAAAAAUCUAAAAAAAAAAAACGAAA
AAAAAAAAACCCAAAAAAAAAAAAGACAAAAAAAAAAAAUAGAAAAAA
AAAAAGUUAAAAAAAAAAAACUGAAAAAAAAAAAAUUUAAAAAAAAAA
AAUCUAG
Native A1AT
(SEQ ID NO: 1563)
GGGAAGCUCAGAAUAAACGCUCAACUUUGGCCGGAUCUGGCGCGCCAC
CAUGCCGUCUUCUGUCUCGUGGGGCAUCCUCCUGCUGGCAGGCCUGUG
CUGCCUGGUCCCUGUCUCCCUGGCUGAGGAUCCCCAGGGAGAUGCUGC
CCAGAAGACAGAUACAUCCCACCAUGAUCAGGAUCACCCAACCUUCAA
CAAGAUCACCCCCAACCUGGCUGAGUUCGCCUUCAGCCUAUACCGCCA
GCUGGCACACCAGUCCAACAGCACCAAUAUCUUCUUCUCCCCAGUGAG
CAUCGCUACAGCCUUUGCAAUGCUCUCCCUGGGGACCAAGGCUGACAC
UCACGAUGAAAUCCUGGAGGGCCUGAAUUUCAACCUCACGGAGAUUCC
GGAGGCUCAGAUCCAUGAAGGCUUCCAGGAACUCCUCCGUACCCUCAA
CCAGCCAGACAGCCAGCUCCAGCUGACCACCGGCAAUGGCCUGUUCCU
CAGCGAGGGCCUGAAGCUAGUGGAUAAGUUUUUGGAGGAUGUUAAAAA
GUUGUACCACUCAGAAGCCUUCACUGUCAACUUCGGGGACACCGAAGA
GGCCAAGAAACAGAUCAACGAUUACGUGGAGAAGGGUACUCAAGGGAA
AAUUGUGGAUUUGGUCAAGGAGCUUGACAGAGACACAGUUUUUGCUCU
GGUGAAUUACAUCUUCUUUAAAGGCAAAUGGGAGAGACCCUUUGAAGU
CAAGGACACCGAGGAAGAGGACUUCCACGUGGACCAGGUGACCACCGU
GAAGGUGCCUAUGAUGAAGCGUUUAGGCAUGUUUAACAUCCAGCACUG
UAAGAAGCUGUCCAGCUGGGUGCUGCUGAUGAAAUACCUGGGCAAUGC
CACCGCCAUCUUCUUCCUGCCUGAUGAGGGGAAACUACAGCACCUGGA
AAAUGAACUCACCCACGAUAUCAUCACCAAGUUCCUGGAAAAUGAAGA
CAGAAGGUCUGCCAGCUUACAUUUACCCAAACUGUCCAUUACUGGAAC
CUAUGAUCUGAAGAGCGUCCUGGGUCAACUGGGCAUCACUAAGGUCUU
CAGCAAUGGGGCUGACCUCUCCGGGGUCACAGAGGAGGCACCCCUGAA
GCUCUCCAAGGCCGUGCAUAAGGCUGUGCUGACCAUCGACGAGAAAGG
GACUGAAGCUGCUGGGGCCAUGUUUUUAGAGGCCAUACCCAUGUCUAU
CCCCCCCGAGGUCAAGUUCAACAAACCCUUUGUCUUCUUAAUGAUUGA
ACAAAAUACCAAGUCUCCCCUCUUCAUGGGAAAAGUGGUGAAUCCCAC
CCAAAAAUAAUAGGCUAGCCACCAGCCUCAAGAACACCCGAAUGGAGU
CUCUAAGCUACAUAAUACCAACUUACACUUUACAAAAUGUUGUCCCCC
AAAAUGUAGCCAUUCGUAUCUGCUCCUAAUAAAAAGAAAGUUUCUUCA
CAUUCUCUCGAGAAAAAAAAAAAAUGGAAAAAAAAAAAACGGAAAAAA
AAAAAGGUAAAAAAAAAAAAUAUAAAAAAAAAAACAUAAAAAAAAAAA
ACGAAAAAAAAAAAACGUAAAAAAAAAAAACUCAAAAAAAAAAAGAUA
AAAAAAAAAAACCUAAAAAAAAAAAAUGUAAAAAAAAAAAAGGGAAAA
AAAAAAACGCAAAAAAAAAAAACACAAAAAAAAAAAAUGCAAAAAAAA
AAAAUCGAAAAAAAAAAAAUCUAAAAAAAAAAAACGAAAAAAAAAAAA
CCCAAAAAAAAAAAAGACAAAAAAAAAAAAUAGAAAAAAAAAAAGUUA
AAAAAAAAAAACUGAAAAAAAAAAAAUUUAAAAAAAAAAAAUCUAG

### Example 12—Resistance of Template Insertion Sequences to Sequential siRNA Silencing and CRISPR Editing in SERPINA1 Null Mice

[0410] Nuclease resistance of insertion template sequences was tested in SERPINA1 null mice by inserting the template and following-on with siRNA treatment targeting wild type human SERPINA1. Construct 1 includes a wild type coding sequence and a codon optimized sequence for SERPINA1. The codon optimized sequence is not fully complementary to the antisense sequence of siRNA2 and siRNA3.

[0411] At Day 0, SERPINA1 null mice (n=9 male, 9 female) were dosed with 1 mg/kg (with respect to total RNA cargo content) LNP carrying Cas9 mRNA and sgRNA G000666 (targeting mouse albumin), and with ssAAV derived from Construct 1 A1AT Template at 1.5e11 vg/mouse. All reagents were prepared and dosed as described above. Blood was collected and serum prepared prior to treatment with an siRNA at Days 14 and 28. At Days 28, 29, and 30, mice (n=3 male and 3 female, per group) were treated with LNP formulated of siRNA2 or siRNA3 (0.3 mg/kg), or vehicle control. Blood was collected and serum prepared at Day 32.

[0412] Human A1AT levels in the serum were determined by ELISA (Aviva Biosystems, Cat #OKIA00048) according to manufacturer's protocol.

[0413] FIG. 13A and Table 33 shows hA1AT protein levels as measured by ELISA at Day 28 (pre-dose), and at Day 32 (post-dose). FIG. 13B and Table 34 show the percent knockdown of A1AT following dosing of either siRNA2 or siRNA3.

TABLE 33
hA1AT levels as measured by ELISA pre and post dose of siRNA

| | siRNA2 | | | siRNA3 | | |
|---|---|---|---|---|---|---|
| | Average | SD | | Average | SD | |
| | A1AT | A1AT | | A1AT | A1AT | |
| Day | (μg/mL) | (μg/mL) | N | (μg/mL) | (μg/mL) | N |
| Day 28 | 1098.09 | 476.74 | 6 | 973.73 | 319.92 | 6 |
| Day 32 | 569.32 | 306.84 | 6 | 590.08 | 257.15 | 6 |

TABLE 34
Percent knockdown following dose of siRNA2 and siRNA3

| | siRNA2 | | | siRNA3 | | |
|---|---|---|---|---|---|---|
| | Average | SD | | Average | SD | |
| | A1AT | A1AT | | A1AT | A1AT | |
| siRNA | (μg/mL) | (μg/mL) | N | (μg/mL) | (μg/mL) | N |
| Day 28 | 1098.09 | 476.74 | 6 | 973.73 | 319.92 | 6 |
| Day 32 | 569.32 | 306.84 | 6 | 590.08 | 257.15 | 6 |

### Example 13—SERPINA1 Insertion with a Bidirectional Constructs with Various Splice Acceptors

[0414] Construct 11 is a bidirectional construct with the SERPINA1 coding sequences of Construct 8 with human serum albumin splice acceptor sites. Insertion of hSERPINA1 into C57BL mouse albumin locus using bidirectional ssAAV Constructs 7 and 11 was tested. The ssAAV and LNPs tested in this Example were prepared and delivered to mice as described in Example 1.

[0415] Mice at 8-9 weeks of age were dosed with 1 mg/kg (with respect to total RNA cargo content) LNP carrying Cas9 mRNA and sgRNA G000666 (targeting mouse albumin). The ssAAV were assessed at the doses provided in Table 35.

TABLE 35
Dosing regimen for Constructs 7 and 11

| | LNP dose | AAV Dose | N |
|---|---|---|---|
| Vehicle | X | X | 4 |
| Construct 11 | 1 mpk | 2.5e13 vg/kg | 5 |
| Construct 11 | 1 mpk | 7.5e12 vg/kg | 5 |
| Construct 11 | 1 mpk | 2.5e12 vg/kg | 5 |
| Construct 7 | 1 mpk | 2.5e13 vg/kg | 5 |
| Construct 7 | 1 mpk | 7.5e12 vg/kg | 5 |
| Construct 7 | 1 mpk | 2.5e12 vg/kg | 5 |

[0416] Blood was collected at weeks one and two post-dose. Four weeks post dose, the animals are euthanized, liver tissue and blood are collected to assess liver editing and hA1AT expression levels in serum, respectively. Indel formation is determined by NGS. Sera was prepared to measure human alpha1 antitrypsin (hA1AT) serum expression by ELISA (Aviva Biosystems, Cat #OKIA00048). Serum hA1AT levels are shown in FIG. 14 and Table 36 at one week and two weeks post dose.

TABLE 36
Serum A1AT levels after dosing with Constructs 7 and 11

| | | | | Average | |
|---|---|---|---|---|---|
| | | Average | | A1AT, | |
| | AAV | A1AT, week | SD A1AT | week 2 | SD A1AT |
| | Dose | 1 (μg/mL) | (μg/mL) | (μg/mL) | (μg/mL) |
| Vehicle | X | BLOD | | BLOD | |
| Construct 11 | 2.5e13 | 3646.10 | 1079.49 | 6066.59 | 882.25 |
| | vg/kg | | | | |
| Construct 11 | 7.5e12 | 1271.45 | 234.99 | 1522.53 | 320.70 |
| | vg/kg | | | | |
| Construct 11 | 2.5e12 | 596.52 | 561.83 | 843.55 | 969.81 |
| | vg/kg | | | | |
| Construct 7 | 2.5e13 | 4926.10 | 3244.26 | 6730.24 | 4690.71 |
| | vg/kg | | | | |
| Construct 7 | 7.5e12 | 3665.04 | 1690.07 | 4340.04 | 2048.45 |
| | vg/kg | | | | |
| Construct 7 | 2.5e12 | 1498.00 | 1113.63 | 1758.13 | 1339.48 |
| | vg/kg | | | | |

BLOD = below limit of detection

TABLE 37
Additional Sequences

| Construct | Sequence |
|---|---|
| Nanoluc | taggtcagtgaagagaagaacaaaaagcagcatattacagttagttgtcttcatcaa |
| | tctttaaatatgttgtgtggtttttctctccctgtttccacagtttttcttgatcat |
| | gaaaacgccaacaaaattctgaatcggccaaagaggtataattcaggtaaattggaa |
| | gagtttgttcaagggaaccttgagagagaatgtatggaagaaaagtgtagttttgaa |
| | gaagcaGTATTCACTTTGGAGGACTTTGTCGGTGACTGGAGGCAAACCGCTGGTTAT |
| | AATCTCGACCAaGTACTGGAACAGGGCGGGGTAAGTTCCCTCTTTCAGAATTTGGGT |
| | GTAAGCGTCACACCAATCCAGCGGATTGTGTTGTCTGGAGAGAACGGACTCAAAATT |
| | GACATCCATGTTATCATTCCATATGAAGGTCTCAGTGGAGACCAAATGGGGCAGATC |
| | GAGAAGATTTTCAAGGTAGTTTACCCAGTCGACGATCACCACTTCAAAGTCATtCTC |
| | CACTATGGCACACTTGTTATCGACGGAGTAACTCCTAATATGATTGATTACTTTGGT |
| | CGCCCGTATGAGGGCATCGCAGTGTTTGATGGCAAAAAGATCACCGTAACAGGAACG |
| | TTGTGGAATGGGAACAAGATAATCGACGAGAGATTGATAAATCCAGACGGGTCACTC |
| | CTGTTCAGGGTTACAATTAACGGCGTCACAGGATGGAGACTCTGTGAACGAATACTG |
| | GCCacaaatttttcactcctgaagcaggccggagacgtggaggaaaacccagggccc |
| | gtgAGCAAGGGCGAGGAGCTGTTCACCGGGGTGGTGCCCATCCTGGTCGAGCTGGAC |
| | GGCGACGTAAACGGCCACAAGTTCAGCGTGTCCGGCGAGGGCGAGGGCGATGCCACC |
| | TACGGCAAGCTGACCCTGAAGTTCATCTGCACCACCGGCAAGCTGCCCGTGCCCTGG |
| | CCCACCCTCGTGACCACCCTGACCTACGGCGTGCAGTGCTTCAGCCGCTACCCCGAC |
| | CACATGAAGCAGCACGACTTCTTCAAGTCCGCCATGCCCGAAGGCTACGTCCAGGAG |
| | CGCACCATCTTCTTCAAGGACGACGGCAACTACAAGACCCGCGCCGAGGTGAAGTTC |
| | GAGGGCGACACCCTGGTGAACCGCATCGAGCTGAAGGGCATCGACTTCAAGGAGGAC |
| | GGCAACATCCTGGGGCACAAGCTGGAGTACAACTACAACAGCCACAACGTCTATATC |
| | ATGGCCGACAAGCAGAAGAACGGCATCAAGGTGAACTTCAAGATCCGCCACAACATC |
| | GAGGACGGCAGCGTGCAGCTCGCCGACCACTACCAGCAGAACACCCCCATCGGCGAC |
| | GGCCCCGTGCTGCTGCCCGACAACCACTACCTGAGCACCCAGTCCGCCCTGAGCAAA |
| | GACCCCAACGAGAAGCGCGATCACATGGTCCTGCTGGAGTTCGTGACCGCCGCCGGG |
| | ATCACTCTCGGCATGGACGAGCTGTACAAGGGAGGAGGAAGCCCGAAGAAGAAGAGA |
| | AAGGTCTAAcctCGACTGTGCCTTCTAGTTGCCAGCCATCTGTTGTTTGCCCCTCCC |
| | CCGTGCCTTCCTTGACCCTGGAAGGTGCCACTCCCACTGTCCTTTCCTAATAAAATG |
| | AGGAAATTGCATCGCATTGTCTGAGTAGGTGTCATTCTATTCTGGGGGGTGGGGTGG |
| | GGCAGGACAGCAAGGGGGAGGATTGGGAAGACAATAGCAGGCATGCTGGGGATGCGG |
| | TGGGCTCTATGGcttctgaggcggaaagaaccagctggggctctagggggtatcccc |
| | AAAAAACCTCCCACACCTCCCCCTGAACCTGAAACATAAAATGAATGCAATTGTTGT |
| | TGTTAACTTGTTTATTGCAGCTTATAATGGTTACAAATAAAGCAATAGCATCACAAA |
| | TTTCACAAATAAAGCATTTTTTTCACTGCATTCTAGTTGTGGTTTGTCCAAACTCAT |
| | CAATGTATCTTATCATGTCTGTTACACCTTCCTCTTCTTCTTGGGGCTGCCGCCGCC |
| | CTTGTACAGCTCGTCCATGCCCAGGGTGATGCCGGCGGCGGTCACGAACTCCAGCAG |
| | CACCATGTGGTCCCTCTTCTCGTTGGGGTCCTTGCTCAGGGCGCTCTGGGTGCTCAG |
| | GTAGTGGTTGTCGGGCAGCAGCACGGGGCCGTCGCCGATGGGGGTGTTCTGCTGGTA |
| | GTGGTCGGCCAGCTGCACGCTGCCGTCCTCGATGTTGTGCCTGATCTTGAAGTTCAC |
| | CTTGATGCCGTTCTTCTGCTTGTCGGCCATGATGTACACGTTGTGGCTGTTGTAGTT |
| | GTACTCCAGCTTGTGGCCCAGGATGTTGCCGTCCTCCTTGAAGTCGATGCCCTTCAG |
| | CTCGATCCTGTTCACCAGGGTGTCGCCCTCGAACTTCACCTCGGCCCTGGTCTTGTA |
| | GTTGCCGTCGTCCTTGAAGAAGATGGTCCTCTCCTGCACGTAGCCCTCGGGCATGGC |
| | GCTCTTGAAGAAGTCGTGCTGCTTCATGTGGTCGGGGTACCTGCTGAAGCACTGCAC |
| | GCCGTAGGTCAGGGTGGTCACCAGGGTGGGCCAGGGCACGGGCAGCTTGCCGGTGGT |
| | GCAGATGAACTTCAGGGTCAGCTTGCCGTAGGTGGCGTCGCCCTCGCCCTCGCCGCT |
| | CACGCTGAACTTGTGGCCGTTCACGTCGCCGTCCAGCTCCACCAGGATGGGCACCAC |
| | GCCGGTGAACAGCTCCTCGCCCTTGCTCACGGGGCCGGGGTTCTCCTCCACGTCGCC |
| | GGCCTGCTTCAGCAGGCTGAAGTTGGTGGCCAGGATCCTCTCGCACAGCCTCCAGCC |
| | GGTCACGCCGTTGATGGTCACCCTGAACAGCAGGCTGCCGTCGGGGTTGATCAGCCT |
| | CTCGTCGATGATCTTGTTGCCGTTCCACAGGGTGCCGGTCACGGTGATCTTCTTGCC |
| | GTCGAACACGGCGATGCCCTCGTAGGGCCTGCCGAAGTAGTCGATCATGTTGGGGGT |
| | CACGCCGTCGATCACCAGGGTGCCGTAGTGCAGGATCACCTTGAAGTGGTGGTCGTC |
| | CACGGGGTACACCACCTTGAAAATCTTCTCGATCTGGCCCATCTGGTCGCCGCTCAG |
| | GCCCTCGTAGGGGATGATCACGTGGATGTCGATCTTCAGGCCGTTCTCGCCGCTCAG |
| | CACGATCCTCTGGATGGGGGTCACGCTCACGCCCAGGTTCTGGAACAGGCTGCTCAC |
| | GCCGCCCTGCTCCAGCACCTGGTCCAGGTTGTAGCCGGCGGTCTGCCTCCAGTCGCC |
| | CACGAAGTCCTCCAGGGTGAACACGGCCTCCTCGAAGCTGCACTTCTCCTCCATGCA |
| | CTCCCTCTCCAGGTTGCCCTGCACGAACTCCTCCAGCTTGCCGCTGTTGTACCTCTT |
| | GGGCCTGTTCAGGATCTTGTTGGCGTTCTCGTGGTCCAGGAAaactgtggaaacagg |
| | gagagaaaaaccacacaacatatttaaagattgatgaagacaactaactgtaatatg |
| | ctgctttttgttcttctcttcactgaccta (SEQ ID NO: 1550) |

The application's sequence listing, which the Patent Office published only in electronic form, follows.

SEQUENCE LISTING (1569 sequences)

SEQ ID NO: 1 - DNA, 709 bp, Homo sapiens
  source 1..709: mol_type = genomic DNA
gtaagaaatccatttttctattgttcaacttttattctattttcccagtaaaataaagttttagtaaactctgcatctttaaagaattattttggcatttatttctaaaatggcatagtattttgtatttgtgaagtcttacaaggttatcttattaataaaattcaaacatcctaggtaaaaaaaaaaaaaggtcagaattgtttagtgactgtaattttcttttgcgcactaaggaaagtgcaaagtaacttagagtgactgaaacttcacagaatagggttgaagattgaattcataactatcccaaagacctatccattgcactatgctttatttaaaaaccacaaaacctgtgctgttgatctcataaatagaacttgtatttatatttattttcattttagtctgtcttcttggttgctgttgatagacactaaaagagtattagatattatctaagtttgaatataaggctataaatatttaataatttttaaaatagtattcttggtaattgaattattcttctgtttaaaggcagaagaaataattgaacatcatcctgagtttttctgtaggaatcagagcccaatattttgaaacaaatgcataatctaagtcaaatggaaagaaatataaaaagtaacattattacttcttgttttcttcagtatttaacaatccttttttttcttcccttgcccag

SEQ ID NO: 2 - RNA, 20 nt, synthetic construct
  source 1..20: mol_type = other RNA
gagcaacctcactcttgtct

SEQ ID NO: 3 - RNA, 20 nt, synthetic construct
  source 1..20: mol_type = other RNA
atgcatttgtttcaaaatat

SEQ ID NO: 4 - RNA, 20 nt, synthetic construct
  source 1..20: mol_type = other RNA
tgcatttgtttcaaaatatt

SEQ ID NO: 5 - RNA, 20 nt, synthetic construct
  source 1..20: mol_type = other RNA
atttatgagatcaacagcac

SEQ ID NO: 6 - RNA, 20 nt, synthetic construct
  source 1..20: mol_type = other RNA
gatcaacagcacaggttttg

SEQ ID NO: 7 - RNA, 20 nt, synthetic construct
  source 1..20: mol_type = other RNA
ttaaataaagcatagtgcaa

SEQ ID NO: 8 - RNA, 20 nt, synthetic construct
  source 1..20: mol_type = other RNA
taaagcatagtgcaatggat

SEQ ID NO: 9 - RNA, 20 nt, synthetic construct
  source 1..20: mol_type = other RNA
tagtgcaatggataggtctt

SEQ ID NO: 10 - RNA, 20 nt, synthetic construct
  source 1..20: mol_type = other RNA
tactaaaactttattttact

SEQ ID NO: 11 - RNA, 20 nt, synthetic construct
  source 1..20: mol_type = other RNA
aaagttgaacaatagaaaaa

SEQ ID NO: 12 - RNA, 20 nt, synthetic construct
  source 1..20: mol_type = other RNA
aatgcataatctaagtcaaa

SEQ ID NO: 13 - RNA, 20 nt, synthetic construct
  source 1..20: mol_type = other RNA
taataaaattcaaacatcct

SEQ ID NO: 14 - RNA, 20 nt, synthetic construct
  source 1..20: mol_type = other RNA
gcatctttaaagaattattt

SEQ ID NO: 15 - RNA, 20 nt, synthetic construct
  source 1..20: mol_type = other RNA
tttggcatttatttctaaaa

SEQ ID NO: 16 - RNA, 20 nt, synthetic construct
  source 1..20: mol_type = other RNA
tgtatttgtgaagtcttaca

SEQ ID NO: 17 - RNA, 20 nt, synthetic construct
  source 1..20: mol_type = other RNA
tcctaggtaaaaaaaaaaaa

SEQ ID NO: 18 - RNA, 20 nt, synthetic construct
  source 1..20: mol_type = other RNA
taattttcttttgcgcacta

SEQ ID NO: 19 - RNA, 20 nt, synthetic construct
  source 1..20: mol_type = other RNA
tgactgaaacttcacagaat

SEQ ID NO: 20 - RNA, 20 nt, synthetic construct
  source 1..20: mol_type = other RNA
gactgaaacttcacagaata

SEQ ID NO: 21 - RNA, 20 nt, synthetic construct
  source 1..20: mol_type = other RNA
ttcattttagtctgtcttct

SEQ ID NO: 22 - RNA, 20 nt, synthetic construct
  source 1..20: mol_type = other RNA
attatctaagtttgaatata

SEQ ID NO: 23 - RNA, 20 nt, synthetic construct
  source 1..20: mol_type = other RNA
aatttttaaaatagtattct

SEQ ID NO: 24 - RNA, 20 nt, synthetic construct
  source 1..20: mol_type = other RNA
tgaattattcttctgtttaa

SEQ ID NO: 25 - RNA, 20 nt, synthetic construct
  source 1..20: mol_type = other RNA
atcatcctgagtttttctgt

SEQ ID NO: 26 - RNA, 20 nt, synthetic construct
  source 1..20: mol_type = other RNA
ttactaaaactttattttac

SEQ ID NO: 27 - RNA, 20 nt, synthetic construct
  source 1..20: mol_type = other RNA
acctttttttttttttacct

SEQ ID NO: 28 - RNA, 20 nt, synthetic construct
  source 1..20: mol_type = other RNA
agtgcaatggataggtcttt

SEQ ID NO: 29 - RNA, 20 nt, synthetic construct
  source 1..20: mol_type = other RNA
tgattcctacagaaaaactc

SEQ ID NO: 30 - RNA, 20 nt, synthetic construct
  source 1..20: mol_type = other RNA
tgggcaagggaagaaaaaaa

SEQ ID NO: 31 - RNA, 20 nt, synthetic construct
  source 1..20: mol_type = other RNA
cctcactcttgtctgggcaa

SEQ ID NO: 32 - RNA, 20 nt, synthetic construct
  source 1..20: mol_type = other RNA
acctcactcttgtctgggca

SEQ ID NO: 33 - RNA, 20 nt, synthetic construct
  source 1..20: mol_type = other RNA
tgagcaacctcactcttgtc

SEQ ID NO: 34 - RNA, 100 nt, synthetic construct
  source 1..100: mol_type = other RNA
gagcaacctcactcttgtctgttttagagctagaaatagcaagttaaaataaggctagtccgttatcaacttgaaaaagtggcaccgagtcggtgctttt

SEQ ID NO: 35 - RNA, 100 nt, synthetic construct
  source 1..100: mol_type = other RNA
atgcatttgtttcaaaatatgttttagagctagaaatagcaagttaaaataaggctagtccgttatcaacttgaaaaagtggcaccgagtcggtgctttt

SEQ ID NO: 36 - RNA, 100 nt, synthetic construct
  source 1..100: mol_type = other RNA
tgcatttgtttcaaaatattgttttagagctagaaatagcaagttaaaataaggctagtccgttatcaacttgaaaaagtggcaccgagtcggtgctttt

SEQ ID NO: 37 - RNA, 100 nt, synthetic construct
  source 1..100: mol_type = other RNA
atttatgagatcaacagcacgttttagagctagaaatagcaagttaaaataaggctagtccgttatcaacttgaaaaagtggcaccgagtcggtgctttt

SEQ ID NO: 38 - RNA, 100 nt, synthetic construct
  source 1..100: mol_type = other RNA
gatcaacagcacaggttttggttttagagctagaaatagcaagttaaaataaggctagtccgttatcaacttgaaaaagtggcaccgagtcggtgctttt

SEQ ID NO: 39 - RNA, 100 nt, synthetic construct
  source 1..100: mol_type = other RNA
ttaaataaagcatagtgcaagttttagagctagaaatagcaagttaaaataaggctagtccgttatcaacttgaaaaagtggcaccgagtcggtgctttt

SEQ ID NO: 40 - RNA, 100 nt, synthetic construct
  source 1..100: mol_type = other RNA
taaagcatagtgcaatggatgttttagagctagaaatagcaagttaaaataaggctagtccgttatcaacttgaaaaagtggcaccgagtcggtgctttt

SEQ ID NO: 41 - RNA, 100 nt, synthetic construct
  source 1..100: mol_type = other RNA
tagtgcaatggataggtcttgttttagagctagaaatagcaagttaaaataaggctagtccgttatcaacttgaaaaagtggcaccgagtcggtgctttt

SEQ ID NO: 42 - RNA, 100 nt, synthetic construct
  source 1..100: mol_type = other RNA
tactaaaactttattttactgttttagagctagaaatagcaagttaaaataaggctagtccgttatcaacttgaaaaagtggcaccgagtcggtgctttt

SEQ ID NO: 43 - RNA, 100 nt, synthetic construct
  source 1..100: mol_type = other RNA
aaagttgaacaatagaaaaagttttagagctagaaatagcaagttaaaataaggctagtccgttatcaacttgaaaaagtggcaccgagtcggtgctttt

SEQ ID NO: 44 - RNA, 100 nt, synthetic construct
  source 1..100: mol_type = other RNA
aatgcataatctaagtcaaagttttagagctagaaatagcaagttaaaataaggctagtccgttatcaacttgaaaaagtggcaccgagtcggtgctttt

SEQ ID NO: 45 - RNA, 100 nt, synthetic construct
  source 1..100: mol_type = other RNA
taataaaattcaaacatcctgttttagagctagaaatagcaagttaaaataaggctagtccgttatcaacttgaaaaagtggcaccgagtcggtgctttt

SEQ ID NO: 46 - RNA, 100 nt, synthetic construct
  source 1..100: mol_type = other RNA
gcatctttaaagaattatttgttttagagctagaaatagcaagttaaaataaggctagtccgttatcaacttgaaaaagtggcaccgagtcggtgctttt

SEQ ID NO: 47 - RNA, 100 nt, synthetic construct
  source 1..100: mol_type = other RNA
tttggcatttatttctaaaagttttagagctagaaatagcaagttaaaataaggctagtccgttatcaacttgaaaaagtggcaccgagtcggtgctttt

SEQ ID NO: 48 - RNA, 100 nt, synthetic construct
  source 1..100: mol_type = other RNA
tgtatttgtgaagtcttacagttttagagctagaaatagcaagttaaaataaggctagtccgttatcaacttgaaaaagtggcaccgagtcggtgctttt

SEQ ID NO: 49 - RNA, 100 nt, synthetic construct
  source 1..100: mol_type = other RNA
tcctaggtaaaaaaaaaaaagttttagagctagaaatagcaagttaaaataaggctagtccgttatcaacttgaaaaagtggcaccgagtcggtgctttt

SEQ ID NO: 50 - RNA, 100 nt, synthetic construct
  source 1..100: mol_type = other RNA
taattttcttttgcgcactagttttagagctagaaatagcaagttaaaataaggctagtccgttatcaacttgaaaaagtggcaccgagtcggtgctttt

SEQ ID NO: 51 - RNA, 100 nt, synthetic construct
  source 1..100: mol_type = other RNA
tgactgaaacttcacagaatgttttagagctagaaatagcaagttaaaataaggctagtccgttatcaacttgaaaaagtggcaccgagtcggtgctttt

SEQ ID NO: 52 - RNA, 100 nt, synthetic construct
  source 1..100: mol_type = other RNA
gactgaaacttcacagaatagttttagagctagaaatagcaagttaaaataaggctagtccgttatcaacttgaaaaagtggcaccgagtcggtgctttt

SEQ ID NO: 53 - RNA, 100 nt, synthetic construct
  source 1..100: mol_type = other RNA
ttcattttagtctgtcttctgttttagagctagaaatagcaagttaaaataaggctagtccgttatcaacttgaaaaagtggcaccgagtcggtgctttt

SEQ ID NO: 54 - RNA, 100 nt, synthetic construct
  source 1..100: mol_type = other RNA
attatctaagtttgaatatagttttagagctagaaatagcaagttaaaataaggctagtccgttatcaacttgaaaaagtggcaccgagtcggtgctttt

SEQ ID NO: 55 - RNA, 100 nt, synthetic construct
  source 1..100: mol_type = other RNA
aatttttaaaatagtattctgttttagagctagaaatagcaagttaaaataaggctagtccgttatcaacttgaaaaagtggcaccgagtcggtgctttt

SEQ ID NO: 56 - RNA, 100 nt, synthetic construct
  source 1..100: mol_type = other RNA
tgaattattcttctgtttaagttttagagctagaaatagcaagttaaaataaggctagtccgttatcaacttgaaaaagtggcaccgagtcggtgctttt

SEQ ID NO: 57 - RNA, 100 nt, synthetic construct
  source 1..100: mol_type = other RNA
atcatcctgagtttttctgtgttttagagctagaaatagcaagttaaaataaggctagtccgttatcaacttgaaaaagtggcaccgagtcggtgctttt

SEQ ID NO: 58 - RNA, 100 nt, synthetic construct
  source 1..100: mol_type = other RNA
ttactaaaactttattttacgttttagagctagaaatagcaagttaaaataaggctagtccgttatcaacttgaaaaagtggcaccgagtcggtgctttt

SEQ ID NO: 59 - RNA, 100 nt, synthetic construct
  source 1..100: mol_type = other RNA
acctttttttttttttacctgttttagagctagaaatagcaagttaaaataaggctagtccgttatcaacttgaaaaagtggcaccgagtcggtgctttt

SEQ ID NO: 60 - RNA, 100 nt, synthetic construct
  source 1..100: mol_type = other RNA
agtgcaatggataggtctttgttttagagctagaaatagcaagttaaaataaggctagtccgttatcaacttgaaaaagtggcaccgagtcggtgctttt

SEQ ID NO: 61 - RNA, 100 nt, synthetic construct
  source 1..100: mol_type = other RNA
tgattcctacagaaaaactcgttttagagctagaaatagcaagttaaaataaggctagtccgttatcaacttgaaaaagtggcaccgagtcggtgctttt

SEQ ID NO: 62 - RNA, 100 nt, synthetic construct
  source 1..100: mol_type = other RNA
tgggcaagggaagaaaaaaagttttagagctagaaatagcaagttaaaataaggctagtccgttatcaacttgaaaaagtggcaccgagtcggtgctttt

SEQ ID NO: 63 - RNA, 100 nt, synthetic construct
  source 1..100: mol_type = other RNA
cctcactcttgtctgggcaagttttagagctagaaatagcaagttaaaataaggctagtccgttatcaacttgaaaaagtggcaccgagtcggtgctttt

SEQ ID NO: 64 - RNA, 100 nt, synthetic construct
  source 1..100: mol_type = other RNA
acctcactcttgtctgggcagttttagagctagaaatagcaagttaaaataaggctagtccgttatcaacttgaaaaagtggcaccgagtcggtgctttt

SEQ ID NO: 65 - RNA, 100 nt, synthetic construct
  source 1..100: mol_type = other RNA
tgagcaacctcactcttgtcgttttagagctagaaatagcaagttaaaataaggctagtccgttatcaacttgaaaaagtggcaccgagtcggtgctttt

SEQ ID NO: 66 - RNA, 100 nt, synthetic construct; identical to SEQ ID NO: 34
  source 1..100: mol_type = other RNA
  misc_feature 1..4: note = Phosphorothiate linkage
  modified_base 1: mod_base = gm
  modified_base 2: mod_base = OTHER; note = 2' methyl adenosine
  modified_base 3: mod_base = gm
  modified_base 29: mod_base = gm
  modified_base 30: mod_base = cm
  modified_base 31: mod_base = um
  modified_base 32: mod_base = OTHER; note = 2' methyl adenosine
  modified_base 33: mod_base = gm
  modified_base 34..36: mod_base = OTHER; note = 2' methyl adenosine
  modified_base 37: mod_base = um
  modified_base 38: mod_base = OTHER; note = 2' methyl adenosine
  modified_base 39: mod_base = gm
  modified_base 40: mod_base = cm
  modified_base 69: mod_base = OTHER; note = 2' methyl adenosine
  modified_base 70: mod_base = cm
  modified_base 71..72: mod_base = um
  modified_base 73: mod_base = gm
  modified_base 74..78: mod_base = OTHER; note = 2' methyl adenosine
  modified_base 79: mod_base = gm
  modified_base 80: mod_base = um
  modified_base 81..82: mod_base = gm
  modified_base 83: mod_base = cm
  modified_base 84: mod_base = OTHER; note = 2' methyl adenosine
  modified_base 85..86: mod_base = cm
  modified_base 87: mod_base = gm
  modified_base 88: mod_base = OTHER; note = 2' methyl adenosine
  modified_base 89: mod_base = gm
  modified_base 90: mod_base = um
  modified_base 91: mod_base = cm
  modified_base 92..93: mod_base = gm
  modified_base 94: mod_base = um
  modified_base 95: mod_base = gm
  modified_base 96: mod_base = cm
  modified_base 97..100: mod_base = um
  misc_feature 97..100: note = Phosphorothiate linkage

SEQ ID NO: 67 - RNA, 100 nt, synthetic construct; identical to SEQ ID NO: 35
  source 1..100: mol_type = other RNA
  misc_feature 1..4: note = Phosphorothiate linkage
  modified_base 1: mod_base = OTHER; note = 2' methyl adenosine
  modified_base 2: mod_base = um
  modified_base 3: mod_base = gm
  modified_base 29: mod_base = gm
  modified_base 30: mod_base = cm
  modified_base 31: mod_base = um
  modified_base 32: mod_base = OTHER; note = 2' methyl adenosine
  modified_base 33: mod_base = gm
  modified_base 34..36: mod_base = OTHER; note = 2' methyl adenosine
  modified_base 37: mod_base = um
  modified_base 38: mod_base = OTHER; note = 2' methyl adenosine
  modified_base 39: mod_base = gm
  modified_base 40: mod_base = cm
  modified_base 69: mod_base = OTHER; note = 2' methyl adenosine
  modified_base 70: mod_base = cm
  modified_base 71..72: mod_base = um
  modified_base 73: mod_base = gm
  modified_base 74..78: mod_base = OTHER; note = 2' methyl adenosine
  modified_base 79: mod_base = gm
  modified_base 80: mod_base = um
  modified_base 81..82: mod_base = gm
  modified_base 83: mod_base = cm
  modified_base 84: mod_base = OTHER; note = 2' methyl adenosine
  modified_base 85..86: mod_base = cm
  modified_base 87: mod_base = gm
  modified_base 88: mod_base = OTHER; note = 2' methyl adenosine
  modified_base 89: mod_base = gm
  modified_base 90: mod_base = um
  modified_base 91: mod_base = cm
  modified_base 92..93: mod_base = gm
  modified_base 94: mod_base = um
  modified_base 95: mod_base = gm
  modified_base 96: mod_base = cm
  modified_base 97..100: mod_base = um
  misc_feature 97..100: note = Phosphorothiate linkage

SEQ ID NO: 68 - RNA, 100 nt, synthetic construct; identical to SEQ ID NO: 36
  source 1..100: mol_type = other RNA
  misc_feature 1..4: note = Phosphorothiate linkage
  modified_base 1: mod_base = um
  modified_base 2: mod_base = gm
  modified_base 3: mod_base = cm
  modified_base 29: mod_base = gm
  modified_base 30: mod_base = cm
  modified_base 31: mod_base = um
  modified_base 32: mod_base = OTHER; note = 2' methyl adenosine
  modified_base 33: mod_base = gm
  modified_base 34..36: mod_base = OTHER; note = 2' methyl adenosine
  modified_base 37: mod_base = um
  modified_base 38: mod_base = OTHER; note = 2' methyl adenosine
  modified_base 39: mod_base = gm
  modified_base 40: mod_base = cm
  modified_base 69: mod_base = OTHER; note = 2' methyl adenosine
  modified_base 70: mod_base = cm
  modified_base 71..72: mod_base = um
  modified_base 73: mod_base = gm
  modified_base 74..78: mod_base = OTHER; note = 2' methyl adenosine
  modified_base 79: mod_base = gm
  modified_base 80: mod_base = um
  modified_base 81..82: mod_base = gm
  modified_base 83: mod_base = cm
  modified_base 84: mod_base = OTHER; note = 2' methyl adenosine
  modified_base 85..86: mod_base = cm
  modified_base 87: mod_base = gm
  modified_base 88: mod_base = OTHER; note = 2' methyl adenosine
  modified_base 89: mod_base = gm
  modified_base 90: mod_base = um
  modified_base 91: mod_base = cm
  modified_base 92..93: mod_base = gm
  modified_base 94: mod_base = um
  modified_base 95: mod_base = gm
  modified_base 96: mod_base = cm
  modified_base 97..100: mod_base = um
  misc_feature 97..100: note = Phosphorothiate linkage

SEQ ID NO: 69 - RNA, 100 nt, synthetic construct; identical to SEQ ID NO: 37
  source 1..100: mol_type = other RNA
  misc_feature 1..4: note = Phosphorothiate linkage
  modified_base 1: mod_base = OTHER; note = 2' methyl adenosine
  modified_base 2..3: mod_base = um
  modified_base 29: mod_base = gm
  modified_base 30: mod_base = cm
  modified_base 31: mod_base = um
  modified_base 32: mod_base = OTHER; note = 2' methyl adenosine
  modified_base 33: mod_base = gm
  modified_base 34..36: mod_base = OTHER; note = 2' methyl adenosine
  modified_base 37: mod_base = um
  modified_base 38: mod_base = OTHER; note = 2' methyl adenosine
  modified_base 39: mod_base = gm
  modified_base 40: mod_base = cm
  modified_base 69: mod_base = OTHER; note = 2' methyl adenosine
  modified_base 70: mod_base = cm
  modified_base 71..72: mod_base = um
  modified_base 73: mod_base = gm
  modified_base 74..78: mod_base = OTHER; note = 2' methyl adenosine
  modified_base 79: mod_base = gm
  modified_base 80: mod_base = um
  modified_base 81..82: mod_base = gm
  modified_base 83: mod_base = cm
  modified_base 84: mod_base = OTHER; note = 2' methyl adenosine
  modified_base 85..86: mod_base = cm
  modified_base 87: mod_base = gm
  modified_base 88: mod_base = OTHER; note = 2' methyl adenosine
  modified_base 89: mod_base = gm
  modified_base 90: mod_base = um
  modified_base 91: mod_base = cm
  modified_base 92..93: mod_base = gm
  modified_base 94: mod_base = um
  modified_base 95: mod_base = gm
  modified_base 96: mod_base = cm
  modified_base 97..100: mod_base = um
  misc_feature 97..100: note = Phosphorothiate linkage

SEQ ID NO: 70 - RNA, 100 nt, synthetic construct; identical to SEQ ID NO: 38
  source 1..100: mol_type = other RNA
  misc_feature 1..4: note = Phosphorothiate linkage
  modified_base 1: mod_base = gm
  modified_base 2: mod_base = OTHER; note = 2' methyl adenosine
  modified_base 3: mod_base = um
  modified_base 29: mod_base = gm
  modified_base 30: mod_base = cm
  modified_base 31: mod_base = um
  modified_base 32: mod_base = OTHER; note = 2' methyl adenosine
  modified_base 33: mod_base = gm
  modified_base 34..36: mod_base = OTHER; note = 2' methyl adenosine
  modified_base 37: mod_base = um
  modified_base 38: mod_base = OTHER; note = 2' methyl adenosine
  modified_base 39: mod_base = gm
  modified_base 40: mod_base = cm
  modified_base 69: mod_base = OTHER; note = 2' methyl adenosine
  modified_base 70: mod_base = cm
  modified_base 71..72: mod_base = um
  modified_base 73: mod_base = gm
  modified_base 74..78: mod_base = OTHER; note = 2' methyl adenosine
  modified_base 79: mod_base = gm
  modified_base 80: mod_base = um
  modified_base 81..82: mod_base = gm
  modified_base 83: mod_base = cm
  modified_base 84: mod_base = OTHER; note = 2' methyl adenosine
  modified_base 85..86: mod_base = cm
  modified_base 87: mod_base = gm
  modified_base 88: mod_base = OTHER; note = 2' methyl adenosine
  modified_base 89: mod_base = gm
  modified_base 90: mod_base = um
  modified_base 91: mod_base = cm
  modified_base 92..93: mod_base = gm
  modified_base 94: mod_base = um
  modified_base 95: mod_base = gm
  modified_base 96: mod_base = cm
  modified_base 97..100: mod_base = um
  misc_feature 97..100: note = Phosphorothiate linkage

SEQ ID NO: 71 - RNA, 100 nt, synthetic construct; identical to SEQ ID NO: 39
  source 1..100: mol_type = other RNA
  misc_feature 1..4: note = Phosphorothiate linkage
  modified_base 1..2: mod_base = um
  modified_base 3: mod_base = OTHER; note = 2' methyl adenosine
  modified_base 29: mod_base = gm
  modified_base 30: mod_base = cm
  modified_base 31: mod_base = um
  modified_base 32: mod_base = OTHER; note = 2' methyl adenosine
  modified_base 33: mod_base = gm
  modified_base 34..36: mod_base = OTHER; note = 2' methyl adenosine
  modified_base 37: mod_base = um
  modified_base 38: mod_base = OTHER; note = 2' methyl adenosine
  modified_base 39: mod_base = gm
  modified_base 40: mod_base = cm
  modified_base 69: mod_base = OTHER; note = 2' methyl adenosine
  modified_base 70: mod_base = cm
  modified_base 71..72: mod_base = um
  modified_base 73: mod_base = gm
  modified_base 74..78: mod_base = OTHER; note = 2' methyl adenosine
  modified_base 79: mod_base = gm
  modified_base 80: mod_base = um
  modified_base 81..82: mod_base = gm
  modified_base 83: mod_base = cm
  modified_base 84: mod_base = OTHER; note = 2' methyl adenosine
  modified_base 85..86: mod_base = cm
  modified_base 87: mod_base = gm
  modified_base 88: mod_base = OTHER; note = 2' methyl adenosine
  modified_base 89: mod_base = gm
  modified_base 90: mod_base = um
  modified_base 91: mod_base = cm
  modified_base 92..93: mod_base = gm
  modified_base 94: mod_base = um
  modified_base 95: mod_base = gm
  modified_base 96: mod_base = cm
  modified_base 97..100: mod_base = um
  misc_feature 97..100: note = Phosphorothiate linkage

SEQ ID NO: 72 - RNA, 100 nt, synthetic construct; identical to SEQ ID NO: 40
  source 1..100: mol_type = other RNA
  misc_feature 1..4: note = Phosphorothiate linkage
  modified_base 1: mod_base = um
  modified_base 2..3: mod_base = OTHER; note = 2' methyl adenosine
  modified_base 29: mod_base = gm
  modified_base 30: mod_base = cm
  modified_base 31: mod_base = um
  modified_base 32: mod_base = OTHER; note = 2' methyl adenosine
  modified_base 33: mod_base = gm
  modified_base 34..36: mod_base = OTHER; note = 2' methyl adenosine
  modified_base 37: mod_base = um
  modified_base 38: mod_base = OTHER; note = 2' methyl adenosine
  modified_base 39: mod_base = gm
  modified_base 40: mod_base = cm
  modified_base 69: mod_base = OTHER; note = 2' methyl adenosine
  modified_base 70: mod_base = cm
  modified_base 71..72: mod_base = um
  modified_base 73: mod_base = gm
  modified_base 74..78: mod_base = OTHER; note = 2' methyl adenosine
  modified_base 79: mod_base = gm
  modified_base 80: mod_base = um
  modified_base 81..82: mod_base = gm
  modified_base 83: mod_base = cm
  modified_base 84: mod_base = OTHER; note = 2' methyl adenosine
  modified_base 85..86: mod_base = cm
  modified_base 87: mod_base = gm
  modified_base 88: mod_base = OTHER; note = 2' methyl adenosine
  modified_base 89: mod_base = gm
  modified_base 90: mod_base = um
  modified_base 91: mod_base = cm
  modified_base 92..93: mod_base = gm
  modified_base 94: mod_base = um
  modified_base 95: mod_base = gm
  modified_base 96: mod_base = cm
  modified_base 97..100: mod_base = um
  misc_feature 97..100: note = Phosphorothiate linkage

SEQ ID NO: 73 - RNA, 100 nt, synthetic construct; identical to SEQ ID NO: 41
  source 1..100: mol_type = other RNA
  misc_feature 1..4: note = Phosphorothiate linkage
  modified_base 1: mod_base = um
  modified_base 2: mod_base = OTHER; note = 2' methyl adenosine
  modified_base 3: mod_base = gm
  modified_base 29: mod_base = gm
  modified_base 30: mod_base = cm
  modified_base 31: mod_base = um
  modified_base 32: mod_base = OTHER; note = 2' methyl adenosine
  modified_base 33: mod_base = gm
  modified_base 34..36: mod_base = OTHER; note = 2' methyl adenosine
  modified_base 37: mod_base = um
  modified_base 38: mod_base = OTHER; note = 2' methyl adenosine
  modified_base 39: mod_base = gm
  modified_base 40: mod_base = cm
  modified_base 69: mod_base = OTHER; note = 2' methyl adenosine
  modified_base 70: mod_base = cm
  modified_base 71..72: mod_base = um
  modified_base 73: mod_base = gm
  modified_base 74..78: mod_base = OTHER; note = 2' methyl adenosine
  modified_base 79: mod_base = gm
  modified_base 80: mod_base = um
  modified_base 81..82: mod_base = gm
  modified_base 83: mod_base = cm
  modified_base 84: mod_base = OTHER; note = 2' methyl adenosine
  modified_base 85..86: mod_base = cm
  modified_base 87: mod_base = gm
  modified_base 88: mod_base = OTHER; note = 2' methyl adenosine
  modified_base 89: mod_base = gm
  modified_base 90: mod_base = um
  modified_base 91: mod_base = cm
  modified_base 92..93: mod_base = gm
  modified_base 94: mod_base = um
  modified_base 95: mod_base = gm
  modified_base 96: mod_base = cm
  modified_base 97..100: mod_base = um
  misc_feature 97..100: note = Phosphorothiate linkage

SEQ ID NO: 74 - RNA, 100 nt, synthetic construct; identical to SEQ ID NO: 42
  source 1..100: mol_type = other RNA
  misc_feature 1..4: note = Phosphorothiate linkage
  modified_base 1: mod_base = um
  modified_base 2: mod_base = OTHER; note = 2' methyl adenosine
  modified_base 3: mod_base = cm
  modified_base 29: mod_base = gm
  modified_base 30: mod_base = cm
  modified_base 31: mod_base = um
  modified_base 32: mod_base = OTHER; note = 2' methyl adenosine
  modified_base 33: mod_base = gm
  modified_base 34..36: mod_base = OTHER; note = 2' methyl adenosine
  modified_base 37: mod_base = um
  modified_base 38: mod_base = OTHER; note = 2' methyl adenosine
  modified_base 39: mod_base = gm
  modified_base 40: mod_base = cm
  modified_base 69: mod_base = OTHER; note = 2' methyl adenosine
  modified_base 70: mod_base = cm
  modified_base 71..72: mod_base = um
  modified_base 73: mod_base = gm
  modified_base 74..78: mod_base = OTHER; note = 2' methyl adenosine
  modified_base 79: mod_base = gm
  modified_base 80: mod_base = um
  modified_base 81..82: mod_base = gm
  modified_base 83: mod_base = cm
  modified_base 84: mod_base = OTHER; note = 2' methyl adenosine
  modified_base 85..86: mod_base = cm
  modified_base 87: mod_base = gm
  modified_base 88: mod_base = OTHER; note = 2' methyl adenosine
  modified_base 89: mod_base = gm
  modified_base 90: mod_base = um
  modified_base 91: mod_base = cm
  modified_base 92..93: mod_base = gm
  modified_base 94: mod_base = um
  modified_base 95: mod_base = gm
  modified_base 96: mod_base = cm
  modified_base 97..100: mod_base = um
  misc_feature 97..100: note = Phosphorothiate linkage

SEQ ID NO: 75 - RNA, 100 nt, synthetic construct; identical to SEQ ID NO: 43
  source 1..100: mol_type = other RNA
  misc_feature 1..4: note = Phosphorothiate linkage
  modified_base 1..3: mod_base = OTHER; note = 2' methyl adenosine
  modified_base 29: mod_base = gm
  modified_base 30: mod_base = cm
  modified_base 31: mod_base = um
  modified_base 32: mod_base = OTHER; note = 2' methyl adenosine
  modified_base 33: mod_base = gm
  modified_base 34..36: mod_base = OTHER; note = 2' methyl adenosine
  modified_base 37: mod_base = um
  modified_base 38: mod_base = OTHER; note = 2' methyl adenosine
  modified_base 39: mod_base = gm
  modified_base 40: mod_base = cm
  modified_base 69: mod_base = OTHER; note = 2' methyl adenosine
  modified_base 70: mod_base = cm
  modified_base 71..72: mod_base = um
  modified_base 73: mod_base = gm
  modified_base 74..78: mod_base = OTHER; note = 2' methyl adenosine
  modified_base 79: mod_base = gm
  modified_base 80: mod_base = um
  modified_base 81..82: mod_base = gm
  modified_base 83: mod_base = cm
  modified_base 84: mod_base = OTHER; note = 2' methyl adenosine
  modified_base 85..86: mod_base = cm
  modified_base 87: mod_base = gm
  modified_base 88: mod_base = OTHER; note = 2' methyl adenosine
  modified_base 89: mod_base = gm
  modified_base 90: mod_base = um
  modified_base 91: mod_base = cm
  modified_base 92..93: mod_base = gm
  modified_base 94: mod_base = um
  modified_base 95: mod_base = gm
  modified_base 96: mod_base = cm
  modified_base 97..100: mod_base = um
  misc_feature 97..100: note = Phosphorothiate linkage

SEQ ID NO: 76 - RNA, 100 nt, synthetic construct; identical to SEQ ID NO: 44
  source 1..100: mol_type = other RNA
  misc_feature 1..4: note = Phosphorothiate linkage
  modified_base 1..2: mod_base = OTHER; note = 2' methyl adenosine
  modified_base 3: mod_base = um
  modified_base 29: mod_base = gm
  modified_base 30: mod_base = cm
  modified_base 31: mod_base = um
  modified_base 32: mod_base = OTHER; note = 2' methyl adenosine
  modified_base 33: mod_base = gm
  modified_base 34..36: mod_base = OTHER; note = 2' methyl adenosine
  modified_base 37: mod_base = um
  modified_base 38: mod_base = OTHER; note = 2' methyl adenosine
  modified_base 39: mod_base = gm
  modified_base 40: mod_base = cm
  modified_base 69: mod_base = OTHER; note = 2' methyl adenosine
  modified_base 70: mod_base = cm
  modified_base 71..72: mod_base = um
  modified_base 73: mod_base = gm
  modified_base 74..78: mod_base = OTHER; note = 2' methyl adenosine
  modified_base 79: mod_base = gm
  modified_base 80: mod_base = um
  modified_base 81..82: mod_base = gm
  modified_base 83: mod_base = cm
  modified_base 84: mod_base = OTHER; note = 2' methyl adenosine
  modified_base 85..86: mod_base = cm
  modified_base 87: mod_base = gm
  modified_base 88: mod_base = OTHER; note = 2' methyl adenosine
  modified_base 89: mod_base = gm
  modified_base 90: mod_base = um
  modified_base 91: mod_base = cm
  modified_base 92..93: mod_base = gm
  modified_base 94: mod_base = um
  modified_base 95: mod_base = gm
  modified_base 96: mod_base = cm
  modified_base 97..100: mod_base = um
  misc_feature 97..100: note = Phosphorothiate linkage

SEQ ID NO: 77 - RNA, 100 nt, synthetic construct; identical to SEQ ID NO: 45
  source 1..100: mol_type = other RNA
  misc_feature 1..4: note = Phosphorothiate linkage
  modified_base 1: mod_base = um
  modified_base 2..3: mod_base = OTHER; note = 2' methyl adenosine
  modified_base 29: mod_base = gm
  modified_base 30: mod_base = cm
  modified_base 31: mod_base = um
  modified_base 32: mod_base = OTHER; note = 2' methyl adenosine
  modified_base 33: mod_base = gm
  modified_base 34..36: mod_base = OTHER; note = 2' methyl adenosine
  modified_base 37: mod_base = um
  modified_base 38: mod_base = OTHER; note = 2' methyl adenosine
  modified_base 39: mod_base = gm
  modified_base 40: mod_base = cm
  modified_base 69: mod_base = OTHER; note = 2' methyl adenosine
  modified_base 70: mod_base = cm
  modified_base 71..72: mod_base = um
  modified_base 73: mod_base = gm
  modified_base 74..78: mod_base = OTHER; note = 2' methyl adenosine
  modified_base 79: mod_base = gm
  modified_base 80: mod_base = um
  modified_base 81..82: mod_base = gm
  modified_base 83: mod_base = cm
  modified_base 84: mod_base = OTHER; note = 2' methyl adenosine
  modified_base 85..86: mod_base = cm
  modified_base 87: mod_base = gm
  modified_base 88: mod_base = OTHER; note = 2' methyl adenosine
  modified_base 89: mod_base = gm
  modified_base 90: mod_base = um
  modified_base 91: mod_base = cm
  modified_base 92..93: mod_base = gm
  modified_base 94: mod_base = um
  modified_base 95: mod_base = gm
  modified_base 96: mod_base = cm
  modified_base 97..100: mod_base = um
  misc_feature 97..100: note = Phosphorothiate linkage

SEQ ID NO: 78 - RNA, 100 nt, synthetic construct; identical to SEQ ID NO: 46
  source 1..100: mol_type = other RNA
  misc_feature 1..4: note = Phosphorothiate linkage
  modified_base 1: mod_base = gm
  modified_base 2: mod_base = cm
  modified_base 3: mod_base = OTHER; note = 2' methyl adenosine
  modified_base 29: mod_base = gm
  modified_base 30: mod_base = cm
  modified_base 31: mod_base = um
  modified_base 32: mod_base = OTHER; note = 2' methyl adenosine
  modified_base 33: mod_base = gm
  modified_base 34..36: mod_base = OTHER; note = 2' methyl adenosine
  modified_base 37: mod_base = um
  modified_base 38: mod_base = OTHER; note = 2' methyl adenosine
  modified_base 39: mod_base = gm
  modified_base 40: mod_base = cm
  modified_base 69: mod_base = OTHER; note = 2' methyl adenosine
  modified_base 70: mod_base = cm
  modified_base 71..72: mod_base = um
  modified_base 73: mod_base = gm
  modified_base 74..78: mod_base = OTHER; note = 2' methyl adenosine
  modified_base 79: mod_base = gm
  modified_base 80: mod_base = um
  modified_base 81..82: mod_base = gm
  modified_base 83: mod_base = cm
  modified_base 84: mod_base = OTHER; note = 2' methyl adenosine
  modified_base 85..86: mod_base = cm
  modified_base 87: mod_base = gm
  modified_base 88: mod_base = OTHER; note = 2' methyl adenosine
  modified_base 89: mod_base = gm
  modified_base 90: mod_base = um
  modified_base 91: mod_base = cm
  modified_base 92..93: mod_base = gm
  modified_base 94: mod_base = um
  modified_base 95: mod_base = gm
  modified_base 96: mod_base = cm
  modified_base 97..100: mod_base = um
  misc_feature 97..100: note = Phosphorothiate linkage

SEQ ID NO: 79 - RNA, 100 nt, synthetic construct; identical to SEQ ID NO: 47
  source 1..100: mol_type = other RNA
  misc_feature 1..4: note = Phosphorothiate linkage
  modified_base 1..3: mod_base = um
  modified_base 29: mod_base = gm
  modified_base 30: mod_base = cm
  modified_base 31: mod_base = um
  modified_base 32: mod_base = OTHER; note = 2' methyl adenosine
  modified_base 33: mod_base = gm
  modified_base 34..36: mod_base = OTHER; note = 2' methyl adenosine
  modified_base 37: mod_base = um
  modified_base 38: mod_base = OTHER; note = 2' methyl adenosine
  modified_base 39: mod_base = gm
  modified_base 40: mod_base = cm
  modified_base 69: mod_base = OTHER; note = 2' methyl adenosine
  modified_base 70: mod_base = cm
  modified_base 71..72: mod_base = um
  modified_base 73: mod_base = gm
  modified_base 74..78: mod_base = OTHER; note = 2' methyl adenosine
  modified_base 79: mod_base = gm
  modified_base 80: mod_base = um
  modified_base 81..82: mod_base = gm
  modified_base 83: mod_base = cm
  modified_base 84: mod_base = OTHER; note = 2' methyl adenosine
  modified_base 85..86: mod_base = cm
  modified_base 87: mod_base = gm
  modified_base 88: mod_base = OTHER; note = 2' methyl adenosine
  modified_base 89: mod_base = gm
  modified_base 90: mod_base = um
  modified_base 91: mod_base = cm
  modified_base 92..93: mod_base = gm
  modified_base 94: mod_base = um
  modified_base 95: mod_base = gm
  modified_base 96: mod_base = cm
  modified_base 97..100: mod_base = um
  misc_feature 97..100: note = Phosphorothiate linkage

SEQ ID NO: 80 - RNA, 100 nt, synthetic construct; identical to SEQ ID NO: 48
  source 1..100: mol_type = other RNA
  misc_feature 1..4: note = Phosphorothiate linkage
  modified_base 1: mod_base = um
  modified_base 2: mod_base = gm
  modified_base 2: mod_base = um
  modified_base 29: mod_base = gm
  modified_base 30: mod_base = cm
  modified_base 31: mod_base = um
  modified_base 32: mod_base = OTHER; note = 2' methyl adenosine
  modified_base 33: mod_base = gm
  modified_base 34..36: mod_base = OTHER; note = 2' methyl adenosine
  modified_base 37: mod_base = um
  modified_base 38: mod_base = OTHER; note = 2' methyl adenosine
  modified_base 39: mod_base = gm
  modified_base 40: mod_base = cm
  modified_base 69: mod_base = OTHER; note = 2' methyl adenosine
  modified_base 70: mod_base = cm
  modified_base 71..72: mod_base = um
  modified_base 73: mod_base = gm
  modified_base 74..78: mod_base = OTHER; note = 2' methyl adenosine
  modified_base 79: mod_base = gm
  modified_base 80: mod_base = um
  modified_base 81..82: mod_base = gm
  modified_base 83: mod_base = cm
  modified_base 84: mod_base = OTHER; note = 2' methyl adenosine
  modified_base 85..86: mod_base = cm
  modified_base 87: mod_base = gm
  modified_base 88: mod_base = OTHER; note = 2' methyl adenosine
  modified_base 89: mod_base = gm
  modified_base 90: mod_base = um
  modified_base 91: mod_base = cm
  modified_base 92..93: mod_base = gm
  modified_base 94: mod_base = um
  modified_base 95: mod_base = gm
  modified_base 96: mod_base = cm
  modified_base 97..100: mod_base = um
  misc_feature 97..100: note = Phosphorothiate linkage

SEQ ID NO: 81 - RNA, 100 nt, synthetic construct; identical to SEQ ID NO: 49
  source 1..100: mol_type = other RNA
  misc_feature 1..4: note = Phosphorothiate linkage
  modified_base 1..2: mod_base = um
  modified_base 3: mod_base = cm
  modified_base 29: mod_base = gm
  modified_base 30: mod_base = cm
  modified_base 31: mod_base = um
  modified_base 32: mod_base = OTHER; note = 2' methyl adenosine
  modified_base 33: mod_base = gm
  modified_base 34..36: mod_base = OTHER; note = 2' methyl adenosine
  modified_base 37: mod_base = um
  modified_base 38: mod_base = OTHER; note = 2' methyl adenosine
  modified_base 39: mod_base = gm
  modified_base 40: mod_base = cm
  modified_base 69: mod_base = OTHER; note = 2' methyl adenosine
  modified_base 70: mod_base = cm
  modified_base 71..72: mod_base = um
  modified_base 73: mod_base = gm
  modified_base 74..78: mod_base = OTHER; note = 2' methyl adenosine
  modified_base 79: mod_base = gm
  modified_base 80: mod_base = um
  modified_base 81..82: mod_base = gm
  modified_base 83: mod_base = cm
  modified_base 84: mod_base = OTHER; note = 2' methyl adenosine
  modified_base 85..86: mod_base = cm
  modified_base 87: mod_base = gm
  modified_base 88: mod_base = OTHER; note = 2' methyl adenosine
  modified_base 89: mod_base = gm
  modified_base 90: mod_base = um
  modified_base 91: mod_base = cm
  modified_base 92..93: mod_base = gm
  modified_base 94: mod_base = um
  modified_base 95: mod_base = gm
  modified_base 96: mod_base = cm
  modified_base 97..100: mod_base = um
  misc_feature 97..100: note = Phosphorothiate linkage

SEQ ID NO: 82 - RNA, 100 nt, synthetic construct; identical to SEQ ID NO: 50
  source 1..100: mol_type = other RNA
  misc_feature 1..4: note = Phosphorothiate linkage
  modified_base 1: mod_base = gm
  modified_base 2..3: mod_base = OTHER; note = 2' methyl adenosine
  modified_base 29: mod_base = gm
  modified_base 30: mod_base = cm
  modified_base 31: mod_base = um
  modified_base 32: mod_base = OTHER; note = 2' methyl adenosine
  modified_base 33: mod_base = gm
  modified_base 34..36: mod_base = OTHER; note = 2' methyl adenosine
  modified_base 37: mod_base = um
  modified_base 38: mod_base = OTHER; note = 2' methyl adenosine
  modified_base 39: mod_base = gm
  modified_base 40: mod_base = cm
  modified_base 69: mod_base = OTHER; note = 2' methyl adenosine
  modified_base 70: mod_base = cm
  modified_base 71..72: mod_base = um
  modified_base 73: mod_base = gm
  modified_base 74..78: mod_base = OTHER; note = 2' methyl adenosine
  modified_base 79: mod_base = gm
  modified_base 80: mod_base = um
  modified_base 81..82: mod_base = gm
  modified_base 83: mod_base = cm
  modified_base 84: mod_base = OTHER; note = 2' methyl adenosine
  modified_base 85..86: mod_base = cm
  modified_base 87: mod_base = gm
  modified_base 88: mod_base = OTHER; note = 2' methyl adenosine
  modified_base 89: mod_base = gm
  modified_base 90: mod_base = um
  modified_base 91: mod_base = cm
  modified_base 92..93: mod_base = gm
  modified_base 94: mod_base = um
  modified_base 95: mod_base = gm
  modified_base 96: mod_base = cm
  modified_base 97..100: mod_base = um
  misc_feature 97..100: note = Phosphorothiate linkage

SEQ ID NO: 83 - RNA, 100 nt, synthetic construct; identical to SEQ ID NO: 51
  source 1..100: mol_type = other RNA
  misc_feature 1..4: note = Phosphorothiate linkage
  modified_base 1: mod_base = um
  modified_base 2: mod_base = gm
  modified_base 3: mod_base = OTHER; note = 2' methyl adenosine
  modified_base 29: mod_base = gm
  modified_base 30: mod_base = cm
  modified_base 31: mod_base = um
  modified_base 32: mod_base = OTHER; note = 2' methyl adenosine
  modified_base 33: mod_base = gm
  modified_base 34..36: mod_base = OTHER; note = 2' methyl adenosine
  modified_base 37: mod_base = um
  modified_base 38: mod_base = OTHER; note = 2' methyl adenosine
  modified_base 39: mod_base = gm
  modified_base 40: mod_base = cm
  modified_base 69: mod_base = OTHER; note = 2' methyl adenosine
  modified_base 70: mod_base = cm
  modified_base 71..72: mod_base = um
  modified_base 73: mod_base = gm
  modified_base 74..78: mod_base = OTHER; note = 2' methyl adenosine
  modified_base 79: mod_base = gm
  modified_base 80: mod_base = um
  modified_base 81..82: mod_base = gm
  modified_base 83: mod_base = cm
  modified_base 84: mod_base = OTHER; note = 2' methyl adenosine
  modified_base 85..86: mod_base = cm
  modified_base 87: mod_base = gm
  modified_base 88: mod_base = OTHER; note = 2' methyl adenosine
  modified_base 89: mod_base = gm
  modified_base 90: mod_base = um
  modified_base 91: mod_base = cm
  modified_base 92..93: mod_base = gm
  modified_base 94: mod_base = um
  modified_base 95: mod_base = gm
  modified_base 96: mod_base = cm
  modified_base 97..100: mod_base = um
  misc_feature 97..100: note = Phosphorothiate linkage

SEQ ID NO: 84 - RNA, 100 nt, synthetic construct; identical to SEQ ID NO: 52
  source 1..100: mol_type = other RNA
  misc_feature 1..4: note = Phosphorothiate linkage
  modified_base 1: mod_base = gm
  modified_base 2: mod_base = OTHER; note = 2' methyl adenosine
  modified_base 3: mod_base = cm
  modified_base 29: mod_base = gm
  modified_base 30: mod_base = cm
  modified_base 31: mod_base = um
  modified_base 32: mod_base = OTHER; note = 2' methyl adenosine
  modified_base 33: mod_base = gm
  modified_base 34..36: mod_base = OTHER; note = 2' methyl adenosine
  modified_base 37: mod_base = um
  modified_base 38: mod_base = OTHER; note = 2' methyl adenosine
  modified_base 39: mod_base = gm
  modified_base 40: mod_base = cm
  modified_base 69: mod_base = OTHER; note = 2' methyl adenosine
  modified_base 70: mod_base = cm
  modified_base 71..72: mod_base = um
  modified_base 73: mod_base = gm
  modified_base 74..78: mod_base = OTHER; note = 2' methyl adenosine
  modified_base 79: mod_base = gm
  modified_base 80: mod_base = um
  modified_base 81..82: mod_base = gm
  modified_base 83: mod_base = cm
  modified_base 84: mod_base = OTHER; note = 2' methyl adenosine
  modified_base 85..86: mod_base = cm
  modified_base 87: mod_base = gm
  modified_base 88: mod_base = OTHER; note = 2' methyl adenosine
  modified_base 89: mod_base = gm
  modified_base 90: mod_base = um
  modified_base 91: mod_base = cm
  modified_base 92..93: mod_base = gm
  modified_base 94: mod_base = um
  modified_base 95: mod_base = gm
  modified_base 96: mod_base = cm
  modified_base 97..100: mod_base = um
  misc_feature 97..100: note = Phosphorothiate linkage

SEQ ID NO: 85 - RNA, 100 nt, synthetic construct; identical to SEQ ID NO: 53
  source 1..100: mol_type = other RNA
  misc_feature 1..4: note = Phosphorothiate linkage
  modified_base 1..2: mod_base = um
  modified_base 3: mod_base = cm
  modified_base 29: mod_base = gm
  modified_base 30: mod_base = cm
  modified_base 31: mod_base = um
  modified_base 32: mod_base = OTHER; note = 2' methyl adenosine
  modified_base 33: mod_base = gm
  modified_base 34..36: mod_base = OTHER; note = 2' methyl adenosine
  modified_base 37: mod_base = um
  modified_base 38: mod_base = OTHER; note = 2' methyl adenosine
  modified_base 39: mod_base = gm
  modified_base 40: mod_base = cm
  modified_base 69: mod_base = OTHER; note = 2' methyl adenosine
  modified_base 70: mod_base = cm
  modified_base 71..72: mod_base = um
  modified_base 73: mod_base = gm
  modified_base 74..78: mod_base = OTHER; note = 2' methyl adenosine
  modified_base 79: mod_base = gm
  modified_base 80: mod_base = um
  modified_base 81..82: mod_base = gm
  modified_base 83: mod_base = cm
  modified_base 84: mod_base = OTHER; note = 2' methyl adenosine
  modified_base 85..86: mod_base = cm
  modified_base 87: mod_base = gm
  modified_base 88: mod_base = OTHER; note = 2' methyl adenosine
  modified_base 89: mod_base = gm
  modified_base 90: mod_base = um
  modified_base 91: mod_base = cm
  modified_base 92..93: mod_base = gm
  modified_base 94: mod_base = um
  modified_base 95: mod_base = gm
  modified_base 96: mod_base = cm
  modified_base 97..100: mod_base = um
  misc_feature 97..100: note = Phosphorothiate linkage

SEQ ID NO: 86 - RNA, 100 nt, synthetic construct; identical to SEQ ID NO: 54
  source 1..100: mol_type = other RNA
  misc_feature 1..4: note = Phosphorothiate linkage
  modified_base 1: mod_base = OTHER; note = 2' methyl adenosine
  modified_base 2..3: mod_base = um
  modified_base 29: mod_base = gm
  modified_base 30: mod_base = cm
  modified_base 31: mod_base = um
  modified_base 32: mod_base = OTHER; note = 2' methyl adenosine
  modified_base 33: mod_base = gm
  modified_base 34..36: mod_base = OTHER; note = 2' methyl adenosine
  modified_base 37: mod_base = um
  modified_base 38: mod_base = OTHER; note = 2' methyl adenosine
  modified_base 39: mod_base = gm
  modified_base 40: mod_base = cm
  modified_base 69: mod_base = OTHER; note = 2' methyl adenosine
  modified_base 70: mod_base = cm
  modified_base 71..72: mod_base = um
  modified_base 73: mod_base = gm
  modified_base 74..78: mod_base = OTHER; note = 2' methyl adenosine
  modified_base 79: mod_base = gm
  modified_base 80: mod_base = um
  modified_base 81..82: mod_base = gm
  modified_base 83: mod_base = cm
  modified_base 84: mod_base = OTHER; note = 2' methyl adenosine
  modified_base 85..86: mod_base = cm
  modified_base 87: mod_base = gm
  modified_base 88: mod_base = OTHER; note = 2' methyl adenosine
  modified_base 89: mod_base = gm
  modified_base 90: mod_base = um
  modified_base 91: mod_base = cm
  modified_base 92..93: mod_base = gm
  modified_base 94: mod_base = um
  modified_base 95: mod_base = gm
  modified_base 96: mod_base = cm
  modified_base 97..100: mod_base = um
  misc_feature 97..100: note = Phosphorothiate linkage

SEQ ID NO: 87 - RNA, 100 nt, synthetic construct; identical to SEQ ID NO: 55
  source 1..100: mol_type = other RNA
  misc_feature 1..4: note = Phosphorothiate linkage
  modified_base 1..2: mod_base = OTHER; note = 2' methyl adenosine
  modified_base 3: mod_base = um
  modified_base 29: mod_base = gm
  modified_base 30: mod_base = cm
  modified_base 31: mod_base = um
  modified_base 32: mod_base = OTHER; note = 2' methyl adenosine
  modified_base 33: mod_base = gm
  modified_base 34..36: mod_base = OTHER; note = 2' methyl adenosine
  modified_base 37: mod_base = um
  modified_base 38: mod_base = OTHER; note = 2' methyl adenosine
  modified_base 39: mod_base = gm
  modified_base 40: mod_base = cm
  modified_base 69: mod_base = OTHER; note = 2' methyl adenosine
  modified_base 70: mod_base = cm
  modified_base 71..72: mod_base = um
  modified_base 73: mod_base = gm
  modified_base 74..78: mod_base = OTHER; note = 2' methyl adenosine
  modified_base 79: mod_base = gm
  modified_base 80: mod_base = um
  modified_base 81..82: mod_base = gm
  modified_base 83: mod_base = cm
  modified_base 84: mod_base = OTHER; note = 2' methyl adenosine
  modified_base 85..86: mod_base = cm
  modified_base 87: mod_base = gm
  modified_base 88: mod_base = OTHER; note = 2' methyl adenosine
  modified_base 89: mod_base = gm
  modified_base 90: mod_base = um
  modified_base 91: mod_base = cm
  modified_base 92..93: mod_base = gm
  modified_base 94: mod_base = um
  modified_base 95: mod_base = gm
  modified_base 96: mod_base = cm
  modified_base 97..100: mod_base = um
  misc_feature 97..100: note = Phosphorothiate linkage

SEQ ID NO: 88 - RNA, 100 nt, synthetic construct; identical to SEQ ID NO: 56
  source 1..100: mol_type = other RNA
  misc_feature 1..4: note = Phosphorothiate linkage
  modified_base 1: mod_base = um
  modified_base 2: mod_base = gm
  modified_base 3: mod_base = OTHER; note = 2' methyl adenosine
  modified_base 29: mod_base = gm
  modified_base 30: mod_base = cm
  modified_base 31: mod_base = um
  modified_base 32: mod_base = OTHER; note = 2' methyl adenosine
  modified_base 33: mod_base = gm
  modified_base 34..36: mod_base = OTHER; note = 2' methyl adenosine
  modified_base 37: mod_base = um
  modified_base 38: mod_base = OTHER; note = 2' methyl adenosine
  modified_base 39: mod_base = gm
  modified_base 40: mod_base = cm
  modified_base 69: mod_base = OTHER; note = 2' methyl adenosine
  modified_base 70: mod_base = cm
  modified_base 71..72: mod_base = um
  modified_base 73: mod_base = gm
  modified_base 74..78: mod_base = OTHER; note = 2' methyl adenosine
  modified_base 79: mod_base = gm
  modified_base 80: mod_base = um
  modified_base 81..82: mod_base = gm
  modified_base 83: mod_base = cm
  modified_base 84: mod_base = OTHER; note = 2' methyl adenosine
  modified_base 85..86: mod_base = cm
  modified_base 87: mod_base = gm
  modified_base 88: mod_base = OTHER; note = 2' methyl adenosine
  modified_base 89: mod_base = gm
  modified_base 90: mod_base = um
  modified_base 91: mod_base = cm
  modified_base 92..93: mod_base = gm
  modified_base 94: mod_base = um
  modified_base 95: mod_base = gm
  modified_base 96: mod_base = cm
  modified_base 97..100: mod_base = um
  misc_feature 97..100: note = Phosphorothiate linkage

SEQ ID NO: 89 - RNA, 100 nt, synthetic construct; identical to SEQ ID NO: 57
  source 1..100: mol_type = other RNA
  misc_feature 1..4: note = Phosphorothiate linkage
  modified_base 1: mod_base = OTHER; note = 2' methyl adenosine
  modified_base 2: mod_base = um
  modified_base 3: mod_base = cm
  modified_base 29: mod_base = gm
  modified_base 30: mod_base = cm
  modified_base 31: mod_base = um
  modified_base 32: mod_base = OTHER; note = 2' methyl adenosine
  modified_base 33: mod_base = gm
  modified_base 34..36: mod_base = OTHER; note = 2' methyl adenosine
  modified_base 37: mod_base = um
  modified_base 38: mod_base = OTHER; note = 2' methyl adenosine
  modified_base 39: mod_base = gm
  modified_base 40: mod_base = cm
  modified_base 69: mod_base = OTHER; note = 2' methyl adenosine
  modified_base 70: mod_base = cm
  modified_base 71..72: mod_base = um
  modified_base 73: mod_base = gm
  modified_base 74..78: mod_base = OTHER; note = 2' methyl adenosine
  modified_base 79: mod_base = gm
  modified_base 80: mod_base = um
  modified_base 81..82: mod_base = gm
  modified_base 83: mod_base = cm
  modified_base 84: mod_base = OTHER; note = 2' methyl adenosine
  modified_base 85..86: mod_base = cm
  modified_base 87: mod_base = gm
  modified_base 88: mod_base = OTHER; note = 2' methyl adenosine
  modified_base 89: mod_base = gm
  modified_base 90: mod_base = um
  modified_base 91: mod_base = cm
  modified_base 92..93: mod_base = gm
  modified_base 94: mod_base = um
  modified_base 95: mod_base = gm
  modified_base 96: mod_base = cm
  modified_base 97..100: mod_base = um
  misc_feature 97..100: note = Phosphorothiate linkage

SEQ ID NO: 90 - RNA, 100 nt, synthetic construct; identical to SEQ ID NO: 58
  source 1..100: mol_type = other RNA
  misc_feature 1..4: note = Phosphorothiate linkage
  modified_base 1..2: mod_base = um
  modified_base 3: mod_base = OTHER; note = 2' methyl adenosine
  modified_base 29: mod_base = gm
  modified_base 30: mod_base = cm
  modified_base 31: mod_base = um
  modified_base 32: mod_base = OTHER; note = 2' methyl adenosine
  modified_base 33: mod_base = gm
  modified_base 34..36: mod_base = OTHER; note = 2' methyl adenosine
  modified_base 37: mod_base = um
  modified_base 38: mod_base = OTHER; note = 2' methyl adenosine
  modified_base 39: mod_base = gm
  modified_base 40: mod_base = cm
  modified_base 69: mod_base = OTHER; note = 2' methyl adenosine
  modified_base 70: mod_base = cm
  modified_base 71..72: mod_base = um
  modified_base 73: mod_base = gm
  modified_base 74..78: mod_base = OTHER; note = 2' methyl adenosine
  modified_base 79: mod_base = gm
  modified_base 80: mod_base = um
  modified_base 81..82: mod_base = gm
  modified_base 83: mod_base = cm
  modified_base 84: mod_base = OTHER; note = 2' methyl adenosine
  modified_base 85..86: mod_base = cm
  modified_base 87: mod_base = gm
  modified_base 88: mod_base = OTHER; note = 2' methyl adenosine
  modified_base 89: mod_base = gm
  modified_base 90: mod_base = um
  modified_base 91: mod_base = cm
  modified_base 92..93: mod_base = gm
  modified_base 94: mod_base = um
  modified_base 95: mod_base = gm
  modified_base 96: mod_base = cm
  modified_base 97..100: mod_base = um
  misc_feature 97..100: note = Phosphorothiate linkage

SEQ ID NO: 91 - RNA, 100 nt, synthetic construct; identical to SEQ ID NO: 59
  source 1..100: mol_type = other RNA
  modified_base 1: mod_base = OTHER; note = 2' methyl adenosine
  modified_base 2..3: mod_base = cm
  modified_base 29: mod_base = gm
  modified_base 30: mod_base = cm
  modified_base 31: mod_base = um
  modified_base 32: mod_base = OTHER; note = 2' methyl adenosine
  modified_base 33: mod_base = gm
  modified_base 34..36: mod_base = OTHER; note = 2' methyl adenosine
  modified_base 37: mod_base = um
  modified_base 38: mod_base = OTHER; note = 2' methyl adenosine
  modified_base 39: mod_base = gm
  modified_base 40: mod_base = cm
  modified_base 69: mod_base = OTHER; note = 2' methyl adenosine
  modified_base 70: mod_base = cm
  modified_base 71..72: mod_base = um
  modified_base 73: mod_base = gm
  modified_base 74..78: mod_base = OTHER; note = 2' methyl adenosine
  modified_base 79: mod_base = gm
  modified_base 80: mod_base = um
  modified_base 81..82: mod_base = gm
  modified_base 83: mod_base = cm
  modified_base 84: mod_base = OTHER; note = 2' methyl adenosine
  modified_base 85..86: mod_base = cm
  modified_base 87: mod_base = gm
  modified_base 88: mod_base = OTHER; note = 2' methyl adenosine
  modified_base 89: mod_base = gm
  modified_base 90: mod_base = um
  modified_base 91: mod_base = cm
  modified_base 92..93: mod_base = gm
  modified_base 94: mod_base = um
  modified_base 95: mod_base = gm
  modified_base 96: mod_base = cm
  modified_base 97..100: mod_base = um
  misc_feature 97..100: note = Phosphorothiate linkage

SEQ ID NO: 92 - RNA, 100 nt, synthetic construct; identical to SEQ ID NO: 60
  source 1..100: mol_type = other RNA
  misc_feature 1..4: note = Phosphorothiate linkage
  modified_base 1: mod_base = OTHER; note = 2' methyl adenosine
  modified_base 2: mod_base = gm
  modified_base 3: mod_base = um
  modified_base 29: mod_base = gm
  modified_base 30: mod_base = cm
  modified_base 31: mod_base = um
  modified_base 32: mod_base = OTHER; note = 2' methyl adenosine
  modified_base 33: mod_base = gm
  modified_base 34..36: mod_base = OTHER; note = 2' methyl adenosine
  modified_base 37: mod_base = um
  modified_base 38: mod_base = OTHER; note = 2' methyl adenosine
  modified_base 39: mod_base = gm
  modified_base 40: mod_base = cm
  modified_base 69: mod_base = OTHER; note = 2' methyl adenosine
  modified_base 70: mod_base = cm
  modified_base 71..72: mod_base = um
  modified_base 73: mod_base = gm
  modified_base 74..78: mod_base = OTHER; note = 2' methyl adenosine
  modified_base 79: mod_base = gm
  modified_base 80: mod_base = um
  modified_base 81..82: mod_base = gm
  modified_base 83: mod_base = cm
  modified_base 84: mod_base = OTHER; note = 2' methyl adenosine
  modified_base 85..86: mod_base = cm
  modified_base 87: mod_base = gm
  modified_base 88: mod_base = OTHER; note = 2' methyl adenosine
  modified_base 89: mod_base = gm
  modified_base 90: mod_base = um
  modified_base 91: mod_base = cm
  modified_base 92..93: mod_base = gm
  modified_base 94: mod_base = um
  modified_base 95: mod_base = gm
  modified_base 96: mod_base = cm
  modified_base 97..100: mod_base = um
  misc_feature 97..100: note = Phosphorothiate linkage

SEQ ID NO: 93 - RNA, 100 nt, synthetic construct; identical to SEQ ID NO: 61
  source 1..100: mol_type = other RNA
  misc_feature 1..4: note = Phosphorothiate linkage
  modified_base 1: mod_base = um
  modified_base 2: mod_base = gm
  modified_base 3: mod_base = OTHER; note = 2' methyl adenosine
  modified_base 29: mod_base = gm
  modified_base 30: mod_base = cm
  modified_base 31: mod_base = um
  modified_base 32: mod_base = OTHER; note = 2' methyl adenosine
  modified_base 33: mod_base = gm
  modified_base 34..36: mod_base = OTHER; note = 2' methyl adenosine
  modified_base 37: mod_base = um
  modified_base 38: mod_base = OTHER; note = 2' methyl adenosine
  modified_base 39: mod_base = gm
  modified_base 40: mod_base = cm
  modified_base 69: mod_base = OTHER; note = 2' methyl adenosine
  modified_base 70: mod_base = cm
  modified_base 71..72: mod_base = um
  modified_base 73: mod_base = gm
  modified_base 74..78: mod_base = OTHER; note = 2' methyl adenosine
  modified_base 79: mod_base = gm
  modified_base 80: mod_base = um
  modified_base 81..82: mod_base = gm
  modified_base 83: mod_base = cm
  modified_base 84: mod_base = OTHER; note = 2' methyl adenosine
  modified_base 85..86: mod_base = cm
  modified_base 87: mod_base = gm
  modified_base 88: mod_base = OTHER; note = 2' methyl adenosine
  modified_base 89: mod_base = gm
  modified_base 90: mod_base = um
  modified_base 91: mod_base = cm
  modified_base 92..93: mod_base = gm
  modified_base 94: mod_base = um
  modified_base 95: mod_base = gm
  modified_base 96: mod_base = cm
  modified_base 97..100: mod_base = um
  misc_feature 97..100: note = Phosphorothiate linkage

SEQ ID NO: 94 - RNA, 100 nt, synthetic construct; identical to SEQ ID NO: 62
  source 1..100: mol_type = other RNA
  misc_feature 1..4: note = Phosphorothiate linkage
  modified_base 1: mod_base = um
  modified_base 2..3: mod_base = gm
  modified_base 29: mod_base = gm
  modified_base 30: mod_base = cm
  modified_base 31: mod_base = um
  modified_base 32: mod_base = OTHER; note = 2' methyl adenosine
  modified_base 33: mod_base = gm
  modified_base 34..36: mod_base = OTHER; note = 2' methyl adenosine
  modified_base 37: mod_base = um
  modified_base 38: mod_base = OTHER; note = 2' methyl adenosine
  modified_base 39: mod_base = gm
  modified_base 40: mod_base = cm
  modified_base 69: mod_base = OTHER; note = 2' methyl adenosine
  modified_base 70: mod_base = cm
  modified_base 71..72: mod_base = um
  modified_base 73: mod_base = gm
  modified_base 74..78: mod_base = OTHER; note = 2' methyl adenosine
  modified_base 79: mod_base = gm
  modified_base 80: mod_base = um
  modified_base 81..82: mod_base = gm
  modified_base 83: mod_base = cm
  modified_base 84: mod_base = OTHER; note = 2' methyl adenosine
  modified_base 85..86: mod_base = cm
  modified_base 87: mod_base = gm
  modified_base 88: mod_base = OTHER; note = 2' methyl adenosine
  modified_base 89: mod_base = gm
  modified_base 90: mod_base = um
  modified_base 91: mod_base = cm
  modified_base 92..93: mod_base = gm
  modified_base 94: mod_base = um
  modified_base 95: mod_base = gm
  modified_base 96: mod_base = cm
  modified_base 97..100: mod_base = um
  misc_feature 97..100: note = Phosphorothiate linkage

SEQ ID NO: 95 - RNA, 100 nt, synthetic construct; identical to SEQ ID NO: 63
  source 1..100: mol_type = other RNA
  misc_feature 1..4: note = Phosphorothiate linkage
  modified_base 1..2: mod_base = cm
  modified_base 3: mod_base = um
  modified_base 29: mod_base = gm
  modified_base 30: mod_base = cm
  modified_base 31: mod_base = um
  modified_base 32: mod_base = OTHER; note = 2' methyl adenosine
  modified_base 33: mod_base = gm
  modified_base 34..36: mod_base = OTHER; note = 2' methyl adenosine
  modified_base 37: mod_base = um
  modified_base 38: mod_base = OTHER; note = 2' methyl adenosine
  modified_base 39: mod_base = gm
  modified_base 40: mod_base = cm
  modified_base 69: mod_base = OTHER; note = 2' methyl adenosine
  modified_base 70: mod_base = cm
  modified_base 71..72: mod_base = um
  modified_base 73: mod_base = gm
  modified_base 74..78: mod_base = OTHER; note = 2' methyl adenosine
  modified_base 79: mod_base = gm
  modified_base 80: mod_base = um
  modified_base 81..82: mod_base = gm
  modified_base 83: mod_base = cm
  modified_base 84: mod_base = OTHER; note = 2' methyl adenosine
  modified_base 85..86: mod_base = cm
  modified_base 87: mod_base = gm
  modified_base 88: mod_base = OTHER; note = 2' methyl adenosine
  modified_base 89: mod_base = gm
  modified_base 90: mod_base = um
  modified_base 91: mod_base = cm
  modified_base 92..93: mod_base = gm
  modified_base 94: mod_base = um
  modified_base 95: mod_base = gm
  modified_base 96: mod_base = cm
  modified_base 97..100: mod_base = um
  misc_feature 97..100: note = Phosphorothiate linkage

SEQ ID NO: 96 - RNA, 100 nt, synthetic construct; identical to SEQ ID NO: 64
  source 1..100: mol_type = other RNA
  misc_feature 1..4: note = Phosphorothiate linkage
  modified_base 1: mod_base = OTHER; note = 2' methyl adenosine
  modified_base 2..3: mod_base = cm
  modified_base 29: mod_base = gm
  modified_base 30: mod_base = cm
  modified_base 31: mod_base = um
  modified_base 32: mod_base = OTHER; note = 2' methyl adenosine
  modified_base 33: mod_base = gm
  modified_base 34..36: mod_base = OTHER; note = 2' methyl adenosine
  modified_base 37: mod_base = um
  modified_base 38: mod_base = OTHER; note = 2' methyl adenosine
  modified_base 39: mod_base = gm
  modified_base 40: mod_base = cm
  modified_base 69: mod_base = OTHER; note = 2' methyl adenosine
  modified_base 70: mod_base = cm
  modified_base 71..72: mod_base = um
  modified_base 73: mod_base = gm
  modified_base 74..78: mod_base = OTHER; note = 2' methyl adenosine
  modified_base 79: mod_base = gm
  modified_base 80: mod_base = um
  modified_base 81..82: mod_base = gm
  modified_base 83: mod_base = cm
  modified_base 84: mod_base = OTHER; note = 2' methyl adenosine
  modified_base 85..86: mod_base = cm
  modified_base 87: mod_base = gm
  modified_base 88: mod_base = OTHER; note = 2' methyl adenosine
  modified_base 89: mod_base = gm
  modified_base 90: mod_base = um
  modified_base 91: mod_base = cm
  modified_base 92..93: mod_base = gm
  modified_base 94: mod_base = um
  modified_base 95: mod_base = gm
  modified_base 96: mod_base = cm
  modified_base 97..100: mod_base = um
  misc_feature 97..100: note = Phosphorothiate linkage

SEQ ID NO: 97 - RNA, 100 nt, synthetic construct; identical to SEQ ID NO: 65
  source 1..100: mol_type = other RNA
  misc_feature 1..4: note = Phosphorothiate linkage
  modified_base 1: mod_base = um
  modified_base 2: mod_base = gm
  modified_base 3: mod_base = OTHER; note = 2' methyl adenosine
  modified_base 29: mod_base = gm
  modified_base 30: mod_base = cm
  modified_base 31: mod_base = um
  modified_base 32: mod_base = OTHER; note = 2' methyl adenosine
  modified_base 33: mod_base = gm
  modified_base 34..36: mod_base = OTHER; note = 2' methyl adenosine
  modified_base 37: mod_base = um
  modified_base 38: mod_base = OTHER; note = 2' methyl adenosine
  modified_base 39: mod_base = gm
  modified_base 40: mod_base = cm
  modified_base 69: mod_base = OTHER; note = 2' methyl adenosine
  modified_base 70: mod_base = cm
  modified_base 71..72: mod_base = um
  modified_base 73: mod_base = gm
  modified_base 74..78: mod_base = OTHER; note = 2' methyl adenosine
  modified_base 79: mod_base = gm
  modified_base 80: mod_base = um
  modified_base 81..82: mod_base = gm
  modified_base 83: mod_base = cm
  modified_base 84: mod_base = OTHER; note = 2' methyl adenosine
  modified_base 85..86: mod_base = cm
  modified_base 87: mod_base = gm
  modified_base 88: mod_base = OTHER; note = 2' methyl adenosine
  modified_base 89: mod_base = gm
  modified_base 90: mod_base = um
  modified_base 91: mod_base = cm
  modified_base 92..93: mod_base = gm
  modified_base 94: mod_base = um
  modified_base 95: mod_base = gm
  modified_base 96: mod_base = cm
  modified_base 97..100: mod_base = um
  misc_feature 97..100: note = Phosphorothiate linkage

SEQ ID NO: 98 - RNA, 20 nt, synthetic construct
  source 1..20: mol_type = other RNA
atttgcatctgagaaccctt

SEQ ID NO: 99 - RNA, 20 nt, synthetic construct
  source 1..20: mol_type = other RNA
atcgggaactggcatcttca

SEQ ID NO: 100 - RNA, 20 nt, synthetic construct
  source 1..20: mol_type = other RNA
gttacaggaaaatctgaagg

SEQ ID NO: 101 - RNA, 20 nt, synthetic construct
  source 1..20: mol_type = other RNA
gatcgggaactggcatcttc

SEQ ID NO: 102 - RNA, 20 nt, synthetic construct
  source 1..20: mol_type = other RNA
tgcatctgagaacccttagg

SEQ ID NO: 103 - RNA, 20 nt, synthetic construct
  source 1..20: mol_type = other RNA
cactcttgtctgtggaaaca

SEQ ID NO: 104 - RNA, 20 nt, synthetic construct
  source 1..20: mol_type = other RNA
atcgttacaggaaaatctga

SEQ ID NO: 105 - RNA, 20 nt, synthetic construct
  source 1..20: mol_type = other RNA
gcatcttcagggagtagctt

SEQ ID NO: 106 - RNA, 20 nt, synthetic construct
  source 1..20: mol_type = other RNA
caatctttaaatatgttgtg

SEQ ID NO: 107 - RNA, 20 nt, synthetic construct
  source 1..20: mol_type = other RNA
tcactcttgtctgtggaaac

SEQ ID NO: 108 - RNA, 20 nt, synthetic construct
  source 1..20: mol_type = other RNA
tgcttgtatttttctagtaa

SEQ ID NO: 109 - RNA, 20 nt, synthetic construct
  source 1..20: mol_type = other RNA
gtaaatatctactaagacaa

SEQ ID NO: 110 - RNA, 20 nt, synthetic construct
  source 1..20: mol_type = other RNA
tttttctagtaatggaagcc

SEQ ID NO: 111 - RNA, 20 nt, synthetic construct
  source 1..20: mol_type = other RNA
ttatattattgatatatttt

SEQ ID NO: 112 - RNA, 20 nt, synthetic construct
  source 1..20: mol_type = other RNA
gcacagatataaacacttaa

SEQ ID NO: 113 - RNA, 20 nt, synthetic construct
  source 1..20: mol_type = other RNA
cacagatataaacacttaac

SEQ ID NO: 114 - RNA, 20 nt, synthetic construct
  source 1..20: mol_type = other RNA
ggttttaaaaataataatgt

SEQ ID NO: 115 - RNA, 20 nt, synthetic construct
  source 1..20: mol_type = other RNA
tcagattttcctgtaacgat

SEQ ID NO: 116 - RNA, 20 nt, synthetic construct
  source 1..20: mol_type = other RNA
cagattttcctgtaacgatc

SEQ ID NO: 117 - RNA, 20 nt, synthetic construct
  source 1..20: mol_type = other RNA
caatggtaaataagaaataa

SEQ ID NO: 118 - RNA, 20 nt, synthetic construct
  source 1..20: mol_type = other RNA
ggaaaatctgaaggtggcaa

SEQ ID NO: 119 - RNA, 20 nt, synthetic construct
  source 1..20: mol_type = other RNA
ggcgatctcactcttgtctg

SEQ ID NO: 120 - RNA, 100 nt, synthetic construct
  source 1..100: mol_type = other RNA
atttgcatctgagaacccttgttttagagctagaaatagcaagttaaaataaggctagtccgttatcaacttgaaaaagtggcaccgagtcggtgctttt

SEQ ID NO: 121 - RNA, 100 nt, synthetic construct
  source 1..100: mol_type = other RNA
atcgggaactggcatcttcagttttagagctagaaatagcaagttaaaataaggctagtccgttatcaacttgaaaaagtggcaccgagtcggtgctttt

SEQ ID NO: 122 - RNA, 100 nt, synthetic construct
  source 1..100: mol_type = other RNA
gttacaggaaaatctgaagggttttagagctagaaatagcaagttaaaataaggctagtccgttatcaacttgaaaaagtggcaccgagtcggtgctttt

SEQ ID NO: 123 - RNA, 100 nt, synthetic construct
  source 1..100: mol_type = other RNA
gatcgggaactggcatcttcgttttagagctagaaatagcaagttaaaataaggctagtccgttatcaacttgaaaaagtggcaccgagtcggtgctttt

SEQ ID NO: 124 - RNA, 100 nt, synthetic construct
  source 1..100: mol_type = other RNA
tgcatctgagaacccttagggttttagagctagaaatagcaagttaaaataaggctagtccgttatcaacttgaaaaagtggcaccgagtcggtgctttt

SEQ ID NO: 125 - RNA, 100 nt, synthetic construct
  source 1..100: mol_type = other RNA
cactcttgtctgtggaaacagttttagagctagaaatagcaagttaaaataaggctagtccgttatcaacttgaaaaagtggcaccgagtcggtgctttt

SEQ ID NO: 126 - RNA, 100 nt, synthetic construct
  source 1..100: mol_type = other RNA
atcgttacaggaaaatctgagttttagagctagaaatagcaagttaaaataaggctagtccgttatcaacttgaaaaagtggcaccgagtcggtgctttt

SEQ ID NO: 127 - RNA, 100 nt, synthetic construct
  source 1..100: mol_type = other RNA
gcatcttcagggagtagcttgttttagagctagaaatagcaagttaaaataaggctagtccgttatcaacttgaaaaagtggcaccgagtcggtgctttt

SEQ ID NO: 128 - RNA, 100 nt, synthetic construct
  source 1..100: mol_type = other RNA
caatctttaaatatgttgtggttttagagctagaaatagcaagttaaaataaggctagtccgttatcaacttgaaaaagtggcaccgagtcggtgctttt

SEQ ID NO: 129 - RNA, 100 nt, synthetic construct
  source 1..100: mol_type = other RNA
tcactcttgtctgtggaaacgttttagagctagaaatagcaagttaaaataaggctagtccgttatcaacttgaaaaagtggcaccgagtcggtgctttt

SEQ ID NO: 130 - RNA, 100 nt, synthetic construct
  source 1..100: mol_type = other RNA
tgcttgtatttttctagtaagttttagagctagaaatagcaagttaaaataaggctagtccgttatcaacttgaaaaagtggcaccgagtcggtgctttt

SEQ ID NO: 131 - RNA, 100 nt, synthetic construct
  source 1..100: mol_type = other RNA
gtaaatatctactaagacaagttttagagctagaaatagcaagttaaaataaggctagtccgttatcaacttgaaaaagtggcaccgagtcggtgctttt

SEQ ID NO: 132 - RNA, 100 nt, synthetic construct
  source 1..100: mol_type = other RNA
tttttctagtaatggaagccgttttagagctagaaatagcaagttaaaataaggctagtccgttatcaacttgaaaaagtggcaccgagtcggtgctttt

SEQ ID NO: 133 - RNA, 100 nt, synthetic construct
  source 1..100: mol_type = other RNA
ttatattattgatatattttgttttagagctagaaatagcaagttaaaataaggctagtccgttatcaacttgaaaaagtggcaccgagtcggtgctttt

SEQ ID NO: 134 - RNA, 100 nt, synthetic construct
  source 1..100: mol_type = other RNA
gcacagatataaacacttaagttttagagctagaaatagcaagttaaaataaggctagtccgttatcaacttgaaaaagtggcaccgagtcggtgctttt

SEQ ID NO: 135 - RNA, 100 nt, synthetic construct
  source 1..100: mol_type = other RNA
cacagatataaacacttaacgttttagagctagaaatagcaagttaaaataaggctagtccgttatcaacttgaaaaagtggcaccgagtcggtgctttt

SEQ ID NO: 136 - RNA, 100 nt, synthetic construct
  source 1..100: mol_type = other RNA
ggttttaaaaataataatgtgttttagagctagaaatagcaagttaaaataaggctagtccgttatcaacttgaaaaagtggcaccgagtcggtgctttt

SEQ ID NO: 137 - RNA, 100 nt, synthetic construct
  source 1..100: mol_type = other RNA
tcagattttcctgtaacgatgttttagagctagaaatagcaagttaaaataaggctagtccgttatcaacttgaaaaagtggcaccgagtcggtgctttt

SEQ ID NO: 138 - RNA, 100 nt, synthetic construct
  source 1..100: mol_type = other RNA
cagattttcctgtaacgatcgttttagagctagaaatagcaagttaaaataaggctagtccgttatcaacttgaaaaagtggcaccgagtcggtgctttt

SEQ ID NO: 139 - RNA, 100 nt, synthetic construct
  source 1..100: mol_type = other RNA
caatggtaaataagaaataagttttagagctagaaatagcaagttaaaataaggctagtccgttatcaacttgaaaaagtggcaccgagtcggtgctttt

SEQ ID NO: 140 - RNA, 100 nt, synthetic construct
  source 1..100: mol_type = other RNA
ggaaaatctgaaggtggcaagttttagagctagaaatagcaagttaaaataaggctagtccgttatcaacttgaaaaagtggcaccgagtcggtgctttt

SEQ ID NO: 141 - RNA, 100 nt, synthetic construct
  source 1..100: mol_type = other RNA
ggcgatctcactcttgtctggttttagagctagaaatagcaagttaaaataaggctagtccgttatcaacttgaaaaagtggcaccgagtcggtgctttt

SEQ ID NO: 142 - RNA, 100 nt, synthetic construct; identical to SEQ ID NO: 120
  source 1..100: mol_type = other RNA
  misc_feature 1..4: note = Phosphorothiate linkage
  modified_base 1: mod_base = OTHER; note = 2' methyl adenosine
  modified_base 2..3: mod_base = um
  modified_base 29: mod_base = gm
  modified_base 30: mod_base = cm
  modified_base 31: mod_base = um
  modified_base 32: mod_base = OTHER; note = 2' methyl adenosine
  modified_base 33: mod_base = gm
  modified_base 34..36: mod_base = OTHER; note = 2' methyl adenosine
  modified_base 37: mod_base = um
  modified_base 38: mod_base = OTHER; note = 2' methyl adenosine
  modified_base 39: mod_base = gm
  modified_base 40: mod_base = cm
  modified_base 69: mod_base = OTHER; note = 2' methyl adenosine
  modified_base 70: mod_base = cm
  modified_base 71..72: mod_base = um
  modified_base 73: mod_base = gm
  modified_base 74..78: mod_base = OTHER; note = 2' methyl adenosine
  modified_base 79: mod_base = gm
  modified_base 80: mod_base = um
  modified_base 81..82: mod_base = gm
  modified_base 83: mod_base = cm
  modified_base 84: mod_base = OTHER; note = 2' methyl adenosine
  modified_base 85..86: mod_base = cm
  modified_base 87: mod_base = gm
  modified_base 88: mod_base = OTHER; note = 2' methyl adenosine
  modified_base 89: mod_base = gm
  modified_base 90: mod_base = um
  modified_base 91: mod_base = cm
  modified_base 92..93: mod_base = gm
  modified_base 94: mod_base = um
  modified_base 95: mod_base = gm
  modified_base 96: mod_base = cm
  modified_base 97..100: mod_base = um
  misc_feature 97..100: note = Phosphorothiate linkage

SEQ ID NO: 143 - RNA, 100 nt, synthetic construct; identical to SEQ ID NO: 121
  source 1..100: mol_type = other RNA
  misc_feature 1..4: note = Phosphorothiate linkage
  modified_base 1: mod_base = OTHER; note = 2' methyl adenosine
  modified_base 2: mod_base = um
  modified_base 3: mod_base = cm
  modified_base 29: mod_base = gm
  modified_base 30: mod_base = cm
  modified_base 31: mod_base = um
  modified_base 32: mod_base = OTHER; note = 2' methyl adenosine
  modified_base 33: mod_base = gm
  modified_base 34..36: mod_base = OTHER; note = 2' methyl adenosine
  modified_base 37: mod_base = um
  modified_base 38: mod_base = OTHER; note = 2' methyl adenosine
  modified_base 39: mod_base = gm
  modified_base 40: mod_base = cm
  modified_base 69: mod_base = OTHER; note = 2' methyl adenosine
  modified_base 70: mod_base = cm
  modified_base 71..72: mod_base = um
  modified_base 73: mod_base = gm
  modified_base 74..78: mod_base = OTHER; note = 2' methyl adenosine
  modified_base 79: mod_base = gm
  modified_base 80: mod_base = um
  modified_base 81..82: mod_base = gm
  modified_base 83: mod_base = cm
  modified_base 84: mod_base = OTHER; note = 2' methyl adenosine
  modified_base 85..86: mod_base = cm
  modified_base 87: mod_base = gm
  modified_base 88: mod_base = OTHER; note = 2' methyl adenosine
  modified_base 89: mod_base = gm
  modified_base 90: mod_base = um
  modified_base 91: mod_base = cm
  modified_base 92..93: mod_base = gm
  modified_base 94: mod_base = um
  modified_base 95: mod_base = gm
  modified_base 96: mod_base = cm
  modified_base 97..100: mod_base = um
  misc_feature 97..100: note = Phosphorothiate linkage

SEQ ID NO: 144 - RNA, 100 nt, synthetic construct; identical to SEQ ID NO: 122
  source 1..100: mol_type = other RNA
  misc_feature 1..4: note = Phosphorothiate linkage
  modified_base 1: mod_base = gm
  modified_base 2..3: mod_base = um
  modified_base 29: mod_base = gm
  modified_base 30: mod_base = cm
  modified_base 31: mod_base = um
  modified_base 32: mod_base = OTHER; note = 2' methyl adenosine
  modified_base 33: mod_base = gm
  modified_base 34..36: mod_base = OTHER; note = 2' methyl adenosine
  modified_base 37: mod_base = um
  modified_base 38: mod_base = OTHER; note = 2' methyl adenosine
  modified_base 39: mod_base = gm
  modified_base 40: mod_base = cm
  modified_base 69: mod_base = OTHER; note = 2' methyl adenosine
  modified_base 70: mod_base = cm
  modified_base 71..72: mod_base = um
  modified_base 73: mod_base = gm
  modified_base 74..78: mod_base = OTHER; note = 2' methyl adenosine
  modified_base 79: mod_base = gm
  modified_base 80: mod_base = um
  modified_base 81..82: mod_base = gm
  modified_base 83: mod_base = cm
  modified_base 84: mod_base = OTHER; note = 2' methyl adenosine
  modified_base 85..86: mod_base = cm
  modified_base 87: mod_base = gm
  modified_base 88: mod_base = OTHER; note = 2' methyl adenosine
  modified_base 89: mod_base = gm
  modified_base 90: mod_base = um
  modified_base 91: mod_base = cm
  modified_base 92..93: mod_base = gm
  modified_base 94: mod_base = um
  modified_base 95: mod_base = gm
  modified_base 96: mod_base = cm
  modified_base 97..100: mod_base = um
  misc_feature 97..100: note = Phosphorothiate linkage

SEQ ID NO: 145 - RNA, 100 nt, synthetic construct; identical to SEQ ID NO: 123
  source 1..100: mol_type = other RNA
  misc_feature 1..4: note = Phosphorothiate linkage
  modified_base 1: mod_base = gm
  modified_base 2: mod_base = OTHER; note = 2' methyl adenosine
  modified_base 3: mod_base = um
  modified_base 29: mod_base = gm
  modified_base 30: mod_base = cm
  modified_base 31: mod_base = um
  modified_base 32: mod_base = OTHER; note = 2' methyl adenosine
  modified_base 33: mod_base = gm
  modified_base 34..36: mod_base = OTHER; note = 2' methyl adenosine
  modified_base 37: mod_base = um
  modified_base 38: mod_base = OTHER; note = 2' methyl adenosine
  modified_base 39: mod_base = gm
  modified_base 40: mod_base = cm
  modified_base 69: mod_base = OTHER; note = 2' methyl adenosine
  modified_base 70: mod_base = cm
  modified_base 71..72: mod_base = um
  modified_base 73: mod_base = gm
  modified_base 74..78: mod_base = OTHER; note = 2' methyl adenosine
  modified_base 79: mod_base = gm
  modified_base 80: mod_base = um
  modified_base 81..82: mod_base = gm
  modified_base 83: mod_base = cm
  modified_base 84: mod_base = OTHER; note = 2' methyl adenosine
  modified_base 85..86: mod_base = cm
  modified_base 87: mod_base = gm
  modified_base 88: mod_base = OTHER; note = 2' methyl adenosine
  modified_base 89: mod_base = gm
  modified_base 90: mod_base = um
  modified_base 91: mod_base = cm
  modified_base 92..93: mod_base = gm
  modified_base 94: mod_base = um
  modified_base 95: mod_base = gm
  modified_base 96: mod_base = cm
  modified_base 97..100: mod_base = um
  misc_feature 97..100: note = Phosphorothiate linkage

SEQ ID NO: 146 - RNA, 100 nt, synthetic construct; identical to SEQ ID NO: 124
  source 1..100: mol_type = other RNA
  misc_feature 1..4: note = Phosphorothiate linkage
  modified_base 1: mod_base = um
  modified_base 2: mod_base = gm
  modified_base 3: mod_base = cm
  modified_base 29: mod_base = gm
  modified_base 30: mod_base = cm
  modified_base 31: mod_base = um
  modified_base 32: mod_base = OTHER; note = 2' methyl adenosine
  modified_base 33: mod_base = gm
  modified_base 34..36: mod_base = OTHER; note = 2' methyl adenosine
  modified_base 37: mod_base = um
  modified_base 38: mod_base = OTHER; note = 2' methyl adenosine
  modified_base 39: mod_base = gm
  modified_base 40: mod_base = cm
  modified_base 69: mod_base = OTHER; note = 2' methyl adenosine
  modified_base 70: mod_base = cm
  modified_base 71..72: mod_base = um
  modified_base 73: mod_base = gm
  modified_base 74..78: mod_base = OTHER; note = 2' methyl adenosine
  modified_base 79: mod_base = gm
  modified_base 80: mod_base = um
  modified_base 81..82: mod_base = gm
  modified_base 83: mod_base = cm
  modified_base 84: mod_base = OTHER; note = 2' methyl adenosine
  modified_base 85..86: mod_base = cm
  modified_base 87: mod_base = gm
  modified_base 88: mod_base = OTHER; note = 2' methyl adenosine
  modified_base 89: mod_base = gm
  modified_base 90: mod_base = um
  modified_base 91: mod_base = cm
  modified_base 92..93: mod_base = gm
  modified_base 94: mod_base = um
  modified_base 95: mod_base = gm
  modified_base 96: mod_base = cm
  modified_base 97..100: mod_base = um
  misc_feature 97..100: note = Phosphorothiate linkage

SEQ ID NO: 147 - RNA, 100 nt, synthetic construct; identical to SEQ ID NO: 125
  source 1..100: mol_type = other RNA
  misc_feature 1..4: note = Phosphorothiate linkage
  modified_base 1: mod_base = cm
  modified_base 2: mod_base = OTHER; note = 2' methyl adenosine
  modified_base 3: mod_base = cm
  modified_base 29: mod_base = gm
  modified_base 30: mod_base = cm
  modified_base 31: mod_base = um
  modified_base 32: mod_base = OTHER; note = 2' methyl adenosine
  modified_base 33: mod_base = gm
  modified_base 34..36: mod_base = OTHER; note = 2' methyl adenosine
  modified_base 37: mod_base = um
  modified_base 38: mod_base = OTHER; note = 2' methyl adenosine
  modified_base 39: mod_base = gm
  modified_base 40: mod_base = cm
  modified_base 69: mod_base = OTHER; note = 2' methyl adenosine
  modified_base 70: mod_base = cm
  modified_base 71..72: mod_base = um
  modified_base 73: mod_base = gm
  modified_base 74..78: mod_base = OTHER; note = 2' methyl adenosine
  modified_base 79: mod_base = gm
  modified_base 80: mod_base = um
  modified_base 81..82: mod_base = gm
  modified_base 83: mod_base = cm
  modified_base 84: mod_base = OTHER; note = 2' methyl adenosine
  modified_base 85..86: mod_base = cm
  modified_base 87: mod_base = gm
  modified_base 88: mod_base = OTHER; note = 2' methyl adenosine
  modified_base 89: mod_base = gm
  modified_base 90: mod_base = um
  modified_base 91: mod_base = cm
  modified_base 92..93: mod_base = gm
  modified_base 94: mod_base = um
  modified_base 95: mod_base = gm
  modified_base 96: mod_base = cm
  modified_base 97..100: mod_base = um
  misc_feature 97..100: note = Phosphorothiate linkage

SEQ ID NO: 148 - RNA, 100 nt, synthetic construct; identical to SEQ ID NO: 126
  source 1..100: mol_type = other RNA
  misc_feature 1..4: note = Phosphorothiate linkage
  modified_base 1: mod_base = OTHER; note = 2' methyl adenosine
  modified_base 2: mod_base = um
  modified_base 3: mod_base = cm
  modified_base 29: mod_base = gm
  modified_base 30: mod_base = cm
  modified_base 31: mod_base = um
  modified_base 32: mod_base = OTHER; note = 2' methyl adenosine
  modified_base 33: mod_base = gm
  modified_base 34..36: mod_base = OTHER; note = 2' methyl adenosine
  modified_base 37: mod_base = um
  modified_base 38: mod_base = OTHER; note = 2' methyl adenosine
  modified_base 39: mod_base = gm
  modified_base 40: mod_base = cm
  modified_base 69: mod_base = OTHER; note = 2' methyl adenosine
  modified_base 70: mod_base = cm
  modified_base 71..72: mod_base = um
  modified_base 73: mod_base = gm
  modified_base 74..78: mod_base = OTHER; note = 2' methyl adenosine
  modified_base 79: mod_base = gm
  modified_base 80: mod_base = um
  modified_base 81..82: mod_base = gm
  modified_base 83: mod_base = cm
  modified_base 84: mod_base = OTHER; note = 2' methyl adenosine
  modified_base 85..86: mod_base = cm
  modified_base 87: mod_base = gm
  modified_base 88: mod_base = OTHER; note = 2' methyl adenosine
  modified_base 89: mod_base = gm
  modified_base 90: mod_base = um
  modified_base 91: mod_base = cm
  modified_base 92..93: mod_base = gm
  modified_base 94: mod_base = um
  modified_base 95: mod_base = gm
  modified_base 96: mod_base = cm
  modified_base 97..100: mod_base = um
  misc_feature 97..100: note = Phosphorothiate linkage

SEQ ID NO: 149 - RNA, 100 nt, synthetic construct; identical to SEQ ID NO: 127
  source 1..100: mol_type = other RNA
  misc_feature 1..4: note = Phosphorothiate linkage
  modified_base 1: mod_base = gm
  modified_base 2: mod_base = cm
  modified_base 3: mod_base = OTHER; note = 2' methyl adenosine
  modified_base 29: mod_base = gm
  modified_base 30: mod_base = cm
  modified_base 31: mod_base = um
  modified_base 32: mod_base = OTHER; note = 2' methyl adenosine
  modified_base 33: mod_base = gm
  modified_base 34..36: mod_base = OTHER; note = 2' methyl adenosine
  modified_base 37: mod_base = um
  modified_base 38: mod_base = OTHER; note = 2' methyl adenosine
  modified_base 39: mod_base = gm
  modified_base 40: mod_base = cm
  modified_base 69: mod_base = OTHER; note = 2' methyl adenosine
  modified_base 70: mod_base = cm
  modified_base 71..72: mod_base = um
  modified_base 73: mod_base = gm
  modified_base 74..78: mod_base = OTHER; note = 2' methyl adenosine
  modified_base 79: mod_base = gm
  modified_base 80: mod_base = um
  modified_base 81..82: mod_base = gm
  modified_base 83: mod_base = cm
  modified_base 84: mod_base = OTHER; note = 2' methyl adenosine
  modified_base 85..86: mod_base = cm
  modified_base 87: mod_base = gm
  modified_base 88: mod_base = OTHER; note = 2' methyl adenosine
  modified_base 89: mod_base = gm
  modified_base 90: mod_base = um
  modified_base 91: mod_base = cm
  modified_base 92..93: mod_base = gm
  modified_base 94: mod_base = um
  modified_base 95: mod_base = gm
  modified_base 96: mod_base = cm
  modified_base 97..100: mod_base = um
  misc_feature 97..100: note = Phosphorothiate linkage

SEQ ID NO: 150 - RNA, 100 nt, synthetic construct; identical to SEQ ID NO: 128
  source 1..100: mol_type = other RNA
  misc_feature 1..4: note = Phosphorothiate linkage
  modified_base 1: mod_base = cm
  modified_base 2..3: mod_base = OTHER; note = 2' methyl adenosine
  modified_base 29: mod_base = gm
  modified_base 30: mod_base = cm
  modified_base 31: mod_base = um
  modified_base 32: mod_base = OTHER; note = 2' methyl adenosine
  modified_base 33: mod_base = gm
  modified_base 34..36: mod_base = OTHER; note = 2' methyl adenosine
  modified_base 37: mod_base = um
  modified_base 38: mod_base = OTHER; note = 2' methyl adenosine
  modified_base 39: mod_base = gm
  modified_base 40: mod_base = cm
  modified_base 69: mod_base = OTHER; note = 2' methyl adenosine
  modified_base 70: mod_base = cm
  modified_base 71..72: mod_base = um
  modified_base 73: mod_base = gm
  modified_base 74..78: mod_base = OTHER; note = 2' methyl adenosine
  modified_base 79: mod_base = gm
  modified_base 80: mod_base = um
  modified_base 81..82: mod_base = gm
  modified_base 83: mod_base = cm
  modified_base 84: mod_base = OTHER; note = 2' methyl adenosine
  modified_base 85..86: mod_base = cm
  modified_base 87: mod_base = gm
  modified_base 88: mod_base = OTHER; note = 2' methyl adenosine
  modified_base 89: mod_base = gm
  modified_base 90: mod_base = um
  modified_base 91: mod_base = cm
  modified_base 92..93: mod_base = gm
  modified_base 94: mod_base = um
  modified_base 95: mod_base = gm
  modified_base 96: mod_base = cm
  modified_base 97..100: mod_base = um
  misc_feature 97..100: note = Phosphorothiate linkage

SEQ ID NO: 151 - RNA, 100 nt, synthetic construct; identical to SEQ ID NO: 129
  source 1..100: mol_type = other RNA
  misc_feature 1..4: note = Phosphorothiate linkage
  modified_base 1: mod_base = um
  modified_base 2: mod_base = cm
  modified_base 3: mod_base = OTHER; note = 2' methyl adenosine
  modified_base 29: mod_base = gm
  modified_base 30: mod_base = cm
  modified_base 31: mod_base = um
  modified_base 32: mod_base = OTHER; note = 2' methyl adenosine
  modified_base 33: mod_base = gm
  modified_base 34..36: mod_base = OTHER; note = 2' methyl adenosine
  modified_base 37: mod_base = um
  modified_base 38: mod_base = OTHER; note = 2' methyl adenosine
  modified_base 39: mod_base = gm
  modified_base 40: mod_base = cm
  modified_base 69: mod_base = OTHER; note = 2' methyl adenosine
  modified_base 70: mod_base = cm
  modified_base 71..72: mod_base = um
  modified_base 73: mod_base = gm
  modified_base 74..78: mod_base = OTHER; note = 2' methyl adenosine
  modified_base 79: mod_base = gm
  modified_base 80: mod_base = um
  modified_base 81..82: mod_base = gm
  modified_base 83: mod_base = cm
  modified_base 84: mod_base = OTHER; note = 2' methyl adenosine
  modified_base 85..86: mod_base = cm
  modified_base 87: mod_base = gm
  modified_base 88: mod_base = OTHER; note = 2' methyl adenosine
  modified_base 89: mod_base = gm
  modified_base 90: mod_base = um
  modified_base 91: mod_base = cm
  modified_base 92..93: mod_base = gm
  modified_base 94: mod_base = um
  modified_base 95: mod_base = gm
  modified_base 96: mod_base = cm
  modified_base 97..100: mod_base = um
  misc_feature 97..100: note = Phosphorothiate linkage

SEQ ID NO: 152 - RNA, 100 nt, synthetic construct; identical to SEQ ID NO: 130
  source 1..100: mol_type = other RNA
  misc_feature 1..4: note = Phosphorothiate linkage
  modified_base 1: mod_base = um
  modified_base 2: mod_base = gm
  modified_base 3: mod_base = cm
  modified_base 29: mod_base = gm
  modified_base 30: mod_base = cm
  modified_base 31: mod_base = um
  modified_base 32: mod_base = OTHER; note = 2' methyl adenosine
  modified_base 33: mod_base = gm
  modified_base 34..36: mod_base = OTHER; note = 2' methyl adenosine
  modified_base 37: mod_base = um
  modified_base 38: mod_base = OTHER; note = 2' methyl adenosine
  modified_base 39: mod_base = gm
  modified_base 40: mod_base = cm
  modified_base 69: mod_base = OTHER; note = 2' methyl adenosine
  modified_base 70: mod_base = cm
  modified_base 71..72: mod_base = um
  modified_base 73: mod_base = gm
  modified_base 74..78: mod_base = OTHER; note = 2' methyl adenosine
  modified_base 79: mod_base = gm
  modified_base 80: mod_base = um
  modified_base 81..82: mod_base = gm
  modified_base 83: mod_base = cm
  modified_base 84: mod_base = OTHER; note = 2' methyl adenosine
  modified_base 85..86: mod_base = cm
  modified_base 87: mod_base = gm
  modified_base 88: mod_base = OTHER; note = 2' methyl adenosine
  modified_base 89: mod_base = gm
  modified_base 90: mod_base = um
  modified_base 91: mod_base = cm
  modified_base 92..93: mod_base = gm
  modified_base 94: mod_base = um
  modified_base 95: mod_base = gm
  modified_base 96: mod_base = cm
  modified_base 97..100: mod_base = um
  misc_feature 97..100: note = Phosphorothiate linkage

SEQ ID NO: 153 - RNA, 100 nt, synthetic construct; identical to SEQ ID NO: 131
  source 1..100: mol_type = other RNA
  misc_feature 1..4: note = Phosphorothiate linkage
  modified_base 1: mod_base = gm
  modified_base 2: mod_base = um
  modified_base 3: mod_base = OTHER; note = 2' methyl adenosine
  modified_base 29: mod_base = gm
  modified_base 30: mod_base = cm
  modified_base 31: mod_base = um
  modified_base 32: mod_base = OTHER; note = 2' methyl adenosine
  modified_base 33: mod_base = gm
  modified_base 34..36: mod_base = OTHER; note = 2' methyl adenosine
  modified_base 37: mod_base = um
  modified_base 38: mod_base = OTHER; note = 2' methyl adenosine
  modified_base 39: mod_base = gm
  modified_base 40: mod_base = cm
  modified_base 69: mod_base = OTHER; note = 2' methyl adenosine
  modified_base 70: mod_base = cm
  modified_base 71..72: mod_base = um
  modified_base 73: mod_base = gm
  modified_base 74..78: mod_base = OTHER; note = 2' methyl adenosine
  modified_base 79: mod_base = gm
  modified_base 80: mod_base = um
  modified_base 81..82: mod_base = gm
  modified_base 83: mod_base = cm
  modified_base 84: mod_base = OTHER; note = 2' methyl adenosine
  modified_base 85..86: mod_base = cm
  modified_base 87: mod_base = gm
  modified_base 88: mod_base = OTHER; note = 2' methyl adenosine
  modified_base 89: mod_base = gm
  modified_base 90: mod_base = um
  modified_base 91: mod_base = cm
  modified_base 92..93: mod_base = gm
  modified_base 94: mod_base = um
  modified_base 95: mod_base = gm
  modified_base 96: mod_base = cm
  modified_base 97..100: mod_base = um
  misc_feature 97..100: note = Phosphorothiate linkage

SEQ ID NO: 154 - RNA, 100 nt, synthetic construct; identical to SEQ ID NO: 132
  source 1..100: mol_type = other RNA
  misc_feature 1..4: note = Phosphorothiate linkage
  modified_base 1..3: mod_base = um
  modified_base 29: mod_base = gm
  modified_base 30: mod_base = cm
  modified_base 31: mod_base = um
  modified_base 32: mod_base = OTHER; note = 2' methyl adenosine
  modified_base 33: mod_base = gm
  modified_base 34..36: mod_base = OTHER; note = 2' methyl adenosine
  modified_base 37: mod_base = um
  modified_base 38: mod_base = OTHER; note = 2' methyl adenosine
  modified_base 39: mod_base = gm
  modified_base 40: mod_base = cm
  modified_base 69: mod_base = OTHER; note = 2' methyl adenosine
  modified_base 70: mod_base = cm
  modified_base 71..72: mod_base = um
  modified_base 73: mod_base = gm
  modified_base 74..78: mod_base = OTHER; note = 2' methyl adenosine
  modified_base 79: mod_base = gm
  modified_base 80: mod_base = um
  modified_base 81..82: mod_base = gm
  modified_base 83: mod_base = cm
  modified_base 84: mod_base = OTHER; note = 2' methyl adenosine
  modified_base 85..86: mod_base = cm
  modified_base 87: mod_base = gm
  modified_base 88: mod_base = OTHER; note = 2' methyl adenosine
  modified_base 89: mod_base = gm
  modified_base 90: mod_base = um
  modified_base 91: mod_base = cm
  modified_base 92..93: mod_base = gm
  modified_base 94: mod_base = um
  modified_base 95: mod_base = gm
  modified_base 96: mod_base = cm
  modified_base 97..100: mod_base = um
  misc_feature 97..100: note = Phosphorothiate linkage

SEQ ID NO: 155 - RNA, 100 nt, synthetic construct; identical to SEQ ID NO: 133
  source 1..100: mol_type = other RNA
  misc_feature 1..4: note = Phosphorothiate linkage
  modified_base 1..2: mod_base = um
  modified_base 3: mod_base = OTHER; note = 2' methyl adenosine
  modified_base 29: mod_base = gm
  modified_base 30: mod_base = cm
  modified_base 31: mod_base = um
  modified_base 32: mod_base = OTHER; note = 2' methyl adenosine
  modified_base 33: mod_base = gm
  modified_base 34..36: mod_base = OTHER; note = 2' methyl adenosine
  modified_base 37: mod_base = um
  modified_base 38: mod_base = OTHER; note = 2' methyl adenosine
  modified_base 39: mod_base = gm
  modified_base 40: mod_base = cm
  modified_base 69: mod_base = OTHER; note = 2' methyl adenosine
  modified_base 70: mod_base = cm
  modified_base 71..72: mod_base = um
  modified_base 73: mod_base = gm
  modified_base 74..78: mod_base = OTHER; note = 2' methyl adenosine
  modified_base 79: mod_base = gm
  modified_base 80: mod_base = um
  modified_base 81..82: mod_base = gm
  modified_base 83: mod_base = cm
  modified_base 84: mod_base = OTHER; note = 2' methyl adenosine
  modified_base 85..86: mod_base = cm
  modified_base 87: mod_base = gm
  modified_base 88: mod_base = OTHER; note = 2' methyl adenosine
  modified_base 89: mod_base = gm
  modified_base 90: mod_base = um
  modified_base 91: mod_base = cm
  modified_base 92..93: mod_base = gm
  modified_base 94: mod_base = um
  modified_base 95: mod_base = gm
  modified_base 96: mod_base = cm
  modified_base 97..100: mod_base = um
  misc_feature 97..100: note = Phosphorothiate linkage

SEQ ID NO: 156 - RNA, 100 nt, synthetic construct; identical to SEQ ID NO: 134
  source 1..100: mol_type = other RNA
  misc_feature 1..4: note = Phosphorothiate linkage
  modified_base 1: mod_base = gm
  modified_base 2: mod_base = cm
  modified_base 3: mod_base = OTHER; note = 2' methyl adenosine
  modified_base 29: mod_base = gm
  modified_base 30: mod_base = cm
  modified_base 31: mod_base = um
  modified_base 32: mod_base = OTHER; note = 2' methyl adenosine
  modified_base 33: mod_base = gm
  modified_base 34..36: mod_base = OTHER; note = 2' methyl adenosine
  modified_base 37: mod_base = um
  modified_base 38: mod_base = OTHER; note = 2' methyl adenosine
  modified_base 39: mod_base = gm
  modified_base 40: mod_base = cm
  modified_base 69: mod_base = OTHER; note = 2' methyl adenosine
  modified_base 70: mod_base = cm
  modified_base 71..72: mod_base = um
  modified_base 73: mod_base = gm
  modified_base 74..78: mod_base = OTHER; note = 2' methyl adenosine
  modified_base 79: mod_base = gm
  modified_base 80: mod_base = um
  modified_base 81..82: mod_base = gm
  modified_base 83: mod_base = cm
  modified_base 84: mod_base = OTHER; note = 2' methyl adenosine
  modified_base 85..86: mod_base = cm
  modified_base 87: mod_base = gm
  modified_base 88: mod_base = OTHER; note = 2' methyl adenosine
  modified_base 89: mod_base = gm
  modified_base 90: mod_base = um
  modified_base 91: mod_base = cm
  modified_base 92..93: mod_base = gm
  modified_base 94: mod_base = um
  modified_base 95: mod_base = gm
  modified_base 96: mod_base = cm
  modified_base 97..100: mod_base = um
  misc_feature 97..100: note = Phosphorothiate linkage

SEQ ID NO: 157 - RNA, 100 nt, synthetic construct; identical to SEQ ID NO: 135
  source 1..100: mol_type = other RNA
  misc_feature 1..4: note = Phosphorothiate linkage
  modified_base 1: mod_base = cm
  modified_base 2: mod_base = OTHER; note = 2' methyl adenosine
  modified_base 1: mod_base = cm
  modified_base 29: mod_base = gm
  modified_base 30: mod_base = cm
  modified_base 31: mod_base = um
  modified_base 32: mod_base = OTHER; note = 2' methyl adenosine
  modified_base 33: mod_base = gm
  modified_base 34..36: mod_base = OTHER; note = 2' methyl adenosine
  modified_base 37: mod_base = um
  modified_base 38: mod_base = OTHER; note = 2' methyl adenosine
  modified_base 39: mod_base = gm
  modified_base 40: mod_base = cm
  modified_base 69: mod_base = OTHER; note = 2' methyl adenosine
  modified_base 70: mod_base = cm
  modified_base 71..72: mod_base = um
  modified_base 73: mod_base = gm
  modified_base 74..78: mod_base = OTHER; note = 2' methyl adenosine
  modified_base 79: mod_base = gm
  modified_base 80: mod_base = um
  modified_base 81..82: mod_base = gm
  modified_base 83: mod_base = cm
  modified_base 84: mod_base = OTHER; note = 2' methyl adenosine
  modified_base 85..86: mod_base = cm
  modified_base 87: mod_base = gm
  modified_base 88: mod_base = OTHER; note = 2' methyl adenosine
  modified_base 89: mod_base = gm
  modified_base 90: mod_base = um
  modified_base 91: mod_base = cm
  modified_base 92..93: mod_base = gm
  modified_base 94: mod_base = um
  modified_base 95: mod_base = gm
  modified_base 96: mod_base = cm
  modified_base 97..100: mod_base = um
  misc_feature 97..100: note = Phosphorothiate linkage

SEQ ID NO: 158 - RNA, 100 nt, synthetic construct; identical to SEQ ID NO: 136
  source 1..100: mol_type = other RNA
  misc_feature 1..4: note = Phosphorothiate linkage
  modified_base 1..2: mod_base = gm
  modified_base 3: mod_base = um
  modified_base 29: mod_base = gm
  modified_base 30: mod_base = cm
  modified_base 31: mod_base = um
  modified_base 32: mod_base = OTHER; note = 2' methyl adenosine
  modified_base 33: mod_base = gm
  modified_base 34..36: mod_base = OTHER; note = 2' methyl adenosine
  modified_base 37: mod_base = um
  modified_base 38: mod_base = OTHER; note = 2' methyl adenosine
  modified_base 39: mod_base = gm
  modified_base 40: mod_base = cm
  modified_base 69: mod_base = OTHER; note = 2' methyl adenosine
  modified_base 70: mod_base = cm
  modified_base 71..72: mod_base = um
  modified_base 73: mod_base = gm
  modified_base 74..78: mod_base = OTHER; note = 2' methyl adenosine
  modified_base 79: mod_base = gm
  modified_base 80: mod_base = um
  modified_base 81..82: mod_base = gm
  modified_base 83: mod_base = cm
  modified_base 84: mod_base = OTHER; note = 2' methyl adenosine
  modified_base 85..86: mod_base = cm
  modified_base 87: mod_base = gm
  modified_base 88: mod_base = OTHER; note = 2' methyl adenosine
  modified_base 89: mod_base = gm
  modified_base 90: mod_base = um
  modified_base 91: mod_base = cm
  modified_base 92..93: mod_base = gm
  modified_base 94: mod_base = um
  modified_base 95: mod_base = gm
  modified_base 96: mod_base = cm
  modified_base 97..100: mod_base = um
  misc_feature 97..100: note = Phosphorothiate linkage

SEQ ID NO: 159 - RNA, 100 nt, synthetic construct; identical to SEQ ID NO: 137
  source 1..100: mol_type = other RNA
  misc_feature 1..4: note = Phosphorothiate linkage
  modified_base 1: mod_base = um
  modified_base 2: mod_base = cm
  modified_base 3: mod_base = OTHER; note = 2' methyl adenosine
  modified_base 29: mod_base = gm
  modified_base 30: mod_base = cm
  modified_base 31: mod_base = um
  modified_base 32: mod_base = OTHER; note = 2' methyl adenosine
  modified_base 33: mod_base = gm
  modified_base 34..36: mod_base = OTHER; note = 2' methyl adenosine
  modified_base 37: mod_base = um
  modified_base 38: mod_base = OTHER; note = 2' methyl adenosine
  modified_base 39: mod_base = gm
  modified_base 40: mod_base = cm
  modified_base 69: mod_base = OTHER; note = 2' methyl adenosine
  modified_base 70: mod_base = cm
  modified_base 71..72: mod_base = um
  modified_base 73: mod_base = gm
  modified_base 74..78: mod_base = OTHER; note = 2' methyl adenosine
  modified_base 79: mod_base = gm
  modified_base 80: mod_base = um
  modified_base 81..82: mod_base = gm
  modified_base 83: mod_base = cm
  modified_base 84: mod_base = OTHER; note = 2' methyl adenosine
  modified_base 85..86: mod_base = cm
  modified_base 87: mod_base = gm
  modified_base 88: mod_base = OTHER; note = 2' methyl adenosine
  modified_base 89: mod_base = gm
  modified_base 90: mod_base = um
  modified_base 91: mod_base = cm
  modified_base 92..93: mod_base = gm
  modified_base 94: mod_base = um
  modified_base 95: mod_base = gm
  modified_base 96: mod_base = cm
  modified_base 97..100: mod_base = um
  misc_feature 97..100: note = Phosphorothiate linkage

SEQ ID NO: 160 - RNA, 100 nt, synthetic construct; identical to SEQ ID NO: 138
  source 1..100: mol_type = other RNA
  misc_feature 1..4: note = Phosphorothiate linkage
  modified_base 1: mod_base = cm
  modified_base 2: mod_base = OTHER; note = 2' methyl adenosine
  modified_base 3: mod_base = gm
  modified_base 29: mod_base = gm
  modified_base 30: mod_base = cm
  modified_base 31: mod_base = um
  modified_base 32: mod_base = OTHER; note = 2' methyl adenosine
  modified_base 33: mod_base = gm
  modified_base 34..36: mod_base = OTHER; note = 2' methyl adenosine
  modified_base 37: mod_base = um
  modified_base 38: mod_base = OTHER; note = 2' methyl adenosine
  modified_base 39: mod_base = gm
  modified_base 40: mod_base = cm
  modified_base 69: mod_base = OTHER; note = 2' methyl adenosine
  modified_base 70: mod_base = cm
  modified_base 71..72: mod_base = um
  modified_base 73: mod_base = gm
  modified_base 74..78: mod_base = OTHER; note = 2' methyl adenosine
  modified_base 79: mod_base = gm
  modified_base 80: mod_base = um
  modified_base 81..82: mod_base = gm
  modified_base 83: mod_base = cm
  modified_base 84: mod_base = OTHER; note = 2' methyl adenosine
  modified_base 85..86: mod_base = cm
  modified_base 87: mod_base = gm
  modified_base 88: mod_base = OTHER; note = 2' methyl adenosine
  modified_base 89: mod_base = gm
  modified_base 90: mod_base = um
  modified_base 91: mod_base = cm
  modified_base 92..93: mod_base = gm
  modified_base 94: mod_base = um
  modified_base 95: mod_base = gm
  modified_base 96: mod_base = cm
  modified_base 97..100: mod_base = um
  misc_feature 97..100: note = Phosphorothiate linkage

SEQ ID NO: 161 - RNA, 100 nt, synthetic construct; identical to SEQ ID NO: 139
  source 1..100: mol_type = other RNA
  misc_feature 1..4: note = Phosphorothiate linkage
  modified_base 1: mod_base = cm
  modified_base 2..3: mod_base = OTHER; note = 2' methyl adenosine
  modified_base 29: mod_base = gm
  modified_base 30: mod_base = cm
  modified_base 31: mod_base = um
  modified_base 32: mod_base = OTHER; note = 2' methyl adenosine
  modified_base 33: mod_base = gm
  modified_base 34..36: mod_base = OTHER; note = 2' methyl adenosine
  modified_base 37: mod_base = um
  modified_base 38: mod_base = OTHER; note = 2' methyl adenosine
  modified_base 39: mod_base = gm
  modified_base 40: mod_base = cm
  modified_base 69: mod_base = OTHER; note = 2' methyl adenosine
  modified_base 70: mod_base = cm
  modified_base 71..72: mod_base = um
  modified_base 73: mod_base = gm
  modified_base 74..78: mod_base = OTHER; note = 2' methyl adenosine
  modified_base 79: mod_base = gm
  modified_base 80: mod_base = um
  modified_base 81..82: mod_base = gm
  modified_base 83: mod_base = cm
  modified_base 84: mod_base = OTHER; note = 2' methyl adenosine
  modified_base 85..86: mod_base = cm
  modified_base 87: mod_base = gm
  modified_base 88: mod_base = OTHER; note = 2' methyl adenosine
  modified_base 89: mod_base = gm
  modified_base 90: mod_base = um
  modified_base 91: mod_base = cm
  modified_base 92..93: mod_base = gm
  modified_base 94: mod_base = um
  modified_base 95: mod_base = gm
  modified_base 96: mod_base = cm
  modified_base 97..100: mod_base = um
  misc_feature 97..100: note = Phosphorothiate linkage

SEQ ID NO: 162 - RNA, 100 nt, synthetic construct; identical to SEQ ID NO: 140
  source 1..100: mol_type = other RNA
  misc_feature 1..4: note = Phosphorothiate linkage
  modified_base 1..2: mod_base = gm
  modified_base 3: mod_base = OTHER; note = 2' methyl adenosine
  modified_base 29: mod_base = gm
  modified_base 30: mod_base = cm
  modified_base 31: mod_base = um
  modified_base 32: mod_base = OTHER; note = 2' methyl adenosine
  modified_base 33: mod_base = gm
  modified_base 34..36: mod_base = OTHER; note = 2' methyl adenosine
  modified_base 37: mod_base = um
  modified_base 38: mod_base = OTHER; note = 2' methyl adenosine
  modified_base 39: mod_base = gm
  modified_base 40: mod_base = cm
  modified_base 69: mod_base = OTHER; note = 2' methyl adenosine
  modified_base 70: mod_base = cm
  modified_base 71..72: mod_base = um
  modified_base 73: mod_base = gm
  modified_base 74..78: mod_base = OTHER; note = 2' methyl adenosine
  modified_base 79: mod_base = gm
  modified_base 80: mod_base = um
  modified_base 81..82: mod_base = gm
  modified_base 83: mod_base = cm
  modified_base 84: mod_base = OTHER; note = 2' methyl adenosine
  modified_base 85..86: mod_base = cm
  modified_base 87: mod_base = gm
  modified_base 88: mod_base = OTHER; note = 2' methyl adenosine
  modified_base 89: mod_base = gm
  modified_base 90: mod_base = um
  modified_base 91: mod_base = cm
  modified_base 92..93: mod_base = gm
  modified_base 94: mod_base = um
  modified_base 95: mod_base = gm
  modified_base 96: mod_base = cm
  modified_base 97..100: mod_base = um
  misc_feature 97..100: note = Phosphorothiate linkage

SEQ ID NO: 163 - RNA, 100 nt, synthetic construct; identical to SEQ ID NO: 141
  source 1..100: mol_type = other RNA
  misc_feature 1..4: note = Phosphorothiate linkage
  modified_base 1..2: mod_base = gm
  modified_base 3: mod_base = cm
  modified_base 29: mod_base = gm
  modified_base 30: mod_base = cm
  modified_base 31: mod_base = um
  modified_base 32: mod_base = OTHER; note = 2' methyl adenosine
  modified_base 33: mod_base = gm
  modified_base 34..36: mod_base = OTHER; note = 2' methyl adenosine
  modified_base 37: mod_base = um
  modified_base 38: mod_base = OTHER; note = 2' methyl adenosine
  modified_base 39: mod_base = gm
  modified_base 40: mod_base = cm
  modified_base 69: mod_base = OTHER; note = 2' methyl adenosine
  modified_base 70: mod_base = cm
  modified_base 71..72: mod_base = um
  modified_base 73: mod_base = gm
  modified_base 74..78: mod_base = OTHER; note = 2' methyl adenosine
  modified_base 79: mod_base = gm
  modified_base 80: mod_base = um
  modified_base 81..82: mod_base = gm
  modified_base 83: mod_base = cm
  modified_base 84: mod_base = OTHER; note = 2' methyl adenosine
  modified_base 85..86: mod_base = cm
  modified_base 87: mod_base = gm
  modified_base 88: mod_base = OTHER; note = 2' methyl adenosine
  modified_base 89: mod_base = gm
  modified_base 90: mod_base = um
  modified_base 91: mod_base = cm
  modified_base 92..93: mod_base = gm
  modified_base 94: mod_base = um
  modified_base 95: mod_base = gm
  modified_base 96: mod_base = cm
  modified_base 97..100: mod_base = um
  misc_feature 97..100: note = Phosphorothiate linkage

SEQ ID NO: 164 - skipped

SEQ ID NO: 165 - RNA, 20 nt, synthetic construct
  source 1..20: mol_type = other RNA
agcaacctcactcttgtctg

SEQ ID NO: 166 - RNA, 20 nt, synthetic construct
  source 1..20: mol_type = other RNA
acctcactcttgtctgggga

SEQ ID NO: 167 - RNA, 20 nt, synthetic construct
  source 1..20: mol_type = other RNA
cctcactcttgtctggggaa

SEQ ID NO: 168 - RNA, 20 nt, synthetic construct
  source 1..20: mol_type = other RNA
ctcactcttgtctggggaag

SEQ ID NO: 169 - RNA, 20 nt, synthetic construct
  source 1..20: mol_type = other RNA
ggggaaggggagaaaaaaaa

SEQ ID NO: 170 - RNA, 20 nt, synthetic construct
  source 1..20: mol_type = other RNA
gggaaggggagaaaaaaaaa

SEQ ID NO: 171 - skipped

SEQ ID NO: 172 - RNA, 20 nt, synthetic construct
  source 1..20: mol_type = other RNA
tacagaaaaagtcaggataa

SEQ ID NO: 173 - RNA, 20 nt, synthetic construct
  source 1..20: mol_type = other RNA
tgattcctacagaaaaagtc

SEQ ID NO: 174 - RNA, 20 nt, synthetic construct
  source 1..20: mol_type = other RNA
tacagaaaaagtcaggataa

SEQ ID NO: 175 - RNA, 20 nt, synthetic construct
  source 1..20: mol_type = other RNA
tttcttctgcctttaaacag

SEQ ID NO: 176 - RNA, 20 nt, synthetic construct
  source 1..20: mol_type = other RNA
ttatagttttatattcaaac

SEQ ID NO: 177-181 - skipped (5 entries)

SEQ ID NO: 182 - RNA, 20 nt, synthetic construct
  source 1..20: mol_type = other RNA
agtgcaatggataggtctta

SEQ ID NO: 183 - RNA, 20 nt, synthetic construct
  source 1..20: mol_type = other RNA
ttactttgcactttccttag

SEQ ID NO: 184 - RNA, 20 nt, synthetic construct
  source 1..20: mol_type = other RNA
tactttgcactttccttagt

SEQ ID NO: 185 - RNA, 20 nt, synthetic construct
  source 1..20: mol_type = other RNA
tctgaccttttattttacct

SEQ ID NO: 186-188 - skipped (3 entries)

SEQ ID NO: 189 - RNA, 20 nt, synthetic construct
  source 1..20: mol_type = other RNA
attatcctgactttttctgt

SEQ ID NO: 190 - RNA, 20 nt, synthetic construct
  source 1..20: mol_type = other RNA
tgaattattcctctgtttaa

SEQ ID NO: 191 - RNA, 20 nt, synthetic construct
  source 1..20: mol_type = other RNA
taattttcttttgcccacta

SEQ ID NO: 192 - RNA, 20 nt, synthetic construct
  source 1..20: mol_type = other RNA
aaaaggtcagaattgtttag

SEQ ID NO: 193 - RNA, 20 nt, synthetic construct
  source 1..20: mol_type = other RNA
aacatcctaggtaaaataaa

SEQ ID NO: 194 - skipped

SEQ ID NO: 195 - RNA, 20 nt, synthetic construct
  source 1..20: mol_type = other RNA
ttgtcatgtatttctaaaat

SEQ ID NO: 196 - RNA, 20 nt, synthetic construct
  source 1..20: mol_type = other RNA
tttgtcatgtatttctaaaa

SEQ ID NO: 197 - skipped

SEQ ID NO: 198 - RNA, 100 nt, synthetic construct
  source 1..100: mol_type = other RNA
agcaacctcactcttgtctggttttagagctagaaatagcaagttaaaataaggctagtccgttatcaacttgaaaaagtggcaccgagtcggtgctttt

SEQ ID NO: 199 - RNA, 100 nt, synthetic construct
  source 1..100: mol_type = other RNA
acctcactcttgtctggggagttttagagctagaaatagcaagttaaaataaggctagtccgttatcaacttgaaaaagtggcaccgagtcggtgctttt

SEQ ID NO: 200 - RNA, 100 nt, synthetic construct
  source 1..100: mol_type = other RNA
cctcactcttgtctggggaagttttagagctagaaatagcaagttaaaataaggctagtccgttatcaacttgaaaaagtggcaccgagtcggtgctttt

SEQ ID NO: 201 - RNA, 100 nt, synthetic construct
  source 1..100: mol_type = other RNA
ctcactcttgtctggggaaggttttagagctagaaatagcaagttaaaataaggctagtccgttatcaacttgaaaaagtggcaccgagtcggtgctttt

SEQ ID NO: 202 - RNA, 100 nt, synthetic construct
  source 1..100: mol_type = other RNA
ggggaaggggagaaaaaaaagttttagagctagaaatagcaagttaaaataaggctagtccgttatcaacttgaaaaagtggcaccgagtcggtgctttt

SEQ ID NO: 203 - RNA, 100 nt, synthetic construct
  source 1..100: mol_type = other RNA
gggaaggggagaaaaaaaaagttttagagctagaaatagcaagttaaaataaggctagtccgttatcaacttgaaaaagtggcaccgagtcggtgctttt

SEQ ID NO: 204-205 - skipped (2 entries)

SEQ ID NO: 206 - RNA, 100 nt, synthetic construct
  source 1..100: mol_type = other RNA
tgattcctacagaaaaagtcgttttagagctagaaatagcaagttaaaataaggctagtccgttatcaacttgaaaaagtggcaccgagtcggtgctttt

SEQ ID NO: 207 - RNA, 100 nt, synthetic construct
  source 1..100: mol_type = other RNA
tacagaaaaagtcaggataagttttagagctagaaatagcaagttaaaataaggctagtccgttatcaacttgaaaaagtggcaccgagtcggtgctttt

SEQ ID NO: 208 - RNA, 100 nt, synthetic construct
  source 1..100: mol_type = other RNA
tttcttctgcctttaaacaggttttagagctagaaatagcaagttaaaataaggctagtccgttatcaacttgaaaaagtggcaccgagtcggtgctttt

SEQ ID NO: 209 - RNA, 100 nt, synthetic construct
  source 1..100: mol_type = other RNA
ttatagttttatattcaaacgttttagagctagaaatagcaagttaaaataaggctagtccgttatcaacttgaaaaagtggcaccgagtcggtgctttt

SEQ ID NO: 210-214 - skipped (5 entries)

SEQ ID NO: 215 - RNA, 100 nt, synthetic construct
  source 1..100: mol_type = other RNA
agtgcaatggataggtcttagttttagagctagaaatagcaagttaaaataaggctagtccgttatcaacttgaaaaagtggcaccgagtcggtgctttt

SEQ ID NO: 216 - RNA, 100 nt, synthetic construct
  source 1..100: mol_type = other RNA
ttactttgcactttccttaggttttagagctagaaatagcaagttaaaataaggctagtccgttatcaacttgaaaaagtggcaccgagtcggtgctttt

SEQ ID NO: 217 - RNA, 100 nt, synthetic construct
  source 1..100: mol_type = other RNA
tactttgcactttccttagtgttttagagctagaaatagcaagttaaaataaggctagtccgttatcaacttgaaaaagtggcaccgagtcggtgctttt

SEQ ID NO: 218 - RNA, 100 nt, synthetic construct
  source 1..100: mol_type = other RNA
tctgaccttttattttacctgttttagagctagaaatagcaagttaaaataaggctagtccgttatcaacttgaaaaagtggcaccgagtcggtgctttt

SEQ ID NO: 219-221 - skipped (3 entries)

SEQ ID NO: 222 - RNA, 100 nt, synthetic construct
  source 1..100: mol_type = other RNA
attatcctgactttttctgtgttttagagctagaaatagcaagttaaaataaggctagtccgttatcaacttgaaaaagtggcaccgagtcggtgctttt

SEQ ID NO: 223 - RNA, 100 nt, synthetic construct
  source 1..100: mol_type = other RNA
tgaattattcctctgtttaagttttagagctagaaatagcaagttaaaataaggctagtccgttatcaacttgaaaaagtggcaccgagtcggtgctttt

SEQ ID NO: 224 - RNA, 100 nt, synthetic construct
  source 1..100: mol_type = other RNA
taattttcttttgcccactagttttagagctagaaatagcaagttaaaataaggctagtccgttatcaacttgaaaaagtggcaccgagtcggtgctttt

SEQ ID NO: 225 - RNA, 100 nt, synthetic construct
  source 1..100: mol_type = other RNA
aaaaggtcagaattgtttaggttttagagctagaaatagcaagttaaaataaggctagtccgttatcaacttgaaaaagtggcaccgagtcggtgctttt

SEQ ID NO: 226 - RNA, 100 nt, synthetic construct
  source 1..100: mol_type = other RNA
aacatcctaggtaaaataaagttttagagctagaaatagcaagttaaaataaggctagtccgttatcaacttgaaaaagtggcaccgagtcggtgctttt

SEQ ID NO: 227 - skipped

SEQ ID NO: 228 - RNA, 100 nt, synthetic construct
  source 1..100: mol_type = other RNA
ttgtcatgtatttctaaaatgttttagagctagaaatagcaagttaaaataaggctagtccgttatcaacttgaaaaagtggcaccgagtcggtgctttt

SEQ ID NO: 229 - RNA, 100 nt, synthetic construct
  source 1..100: mol_type = other RNA
tttgtcatgtatttctaaaagttttagagctagaaatagcaagttaaaataaggctagtccgttatcaacttgaaaaagtggcaccgagtcggtgctttt

SEQ ID NO: 230 - skipped

SEQ ID NO: 231 - RNA, 100 nt, synthetic construct; identical to SEQ ID NO: 198
  source 1..100: mol_type = other RNA
  misc_feature 1..4: note = Phosphorothiate linkage
  modified_base 1: mod_base = OTHER; note = 2' methyl adenosine
  modified_base 2: mod_base = gm
  modified_base 3: mod_base = cm
  modified_base 29: mod_base = gm
  modified_base 30: mod_base = cm
  modified_base 31: mod_base = um
  modified_base 32: mod_base = OTHER; note = 2' methyl adenosine
  modified_base 33: mod_base = gm
  modified_base 34..36: mod_base = OTHER; note = 2' methyl adenosine
  modified_base 37: mod_base = um
  modified_base 38: mod_base = OTHER; note = 2' methyl adenosine
  modified_base 39: mod_base = gm
  modified_base 40: mod_base = cm
  modified_base 69: mod_base = OTHER; note = 2' methyl adenosine
  modified_base 70: mod_base = cm
  modified_base 71..72: mod_base = um
  modified_base 73: mod_base = gm
  modified_base 74..78: mod_base = OTHER; note = 2' methyl adenosine
  modified_base 79: mod_base = gm
  modified_base 80: mod_base = um
  modified_base 81..82: mod_base = gm
  modified_base 83: mod_base = cm
  modified_base 84: mod_base = OTHER; note = 2' methyl adenosine
  modified_base 85..86: mod_base = cm
  modified_base 87: mod_base = gm
  modified_base 88: mod_base = OTHER; note = 2' methyl adenosine
  modified_base 89: mod_base = gm
  modified_base 90: mod_base = um
  modified_base 91: mod_base = cm
  modified_base 92..93: mod_base = gm
  modified_base 94: mod_base = um
  modified_base 95: mod_base = gm
  modified_base 96: mod_base = cm
  modified_base 97..100: mod_base = um
  misc_feature 97..100: note = Phosphorothiate linkage

SEQ ID NO: 232 - RNA, 100 nt, synthetic construct; identical to SEQ ID NO: 199
  source 1..100: mol_type = other RNA
  misc_feature 1..4: note = Phosphorothiate linkage
  modified_base 1: mod_base = OTHER; note = 2' methyl adenosine
  modified_base 2..3: mod_base = cm
  modified_base 29: mod_base = gm
  modified_base 30: mod_base = cm
  modified_base 31: mod_base = um
  modified_base 32: mod_base = OTHER; note = 2' methyl adenosine
  modified_base 33: mod_base = gm
  modified_base 34..36: mod_base = OTHER; note = 2' methyl adenosine
  modified_base 37: mod_base = um
  modified_base 38: mod_base = OTHER; note = 2' methyl adenosine
  modified_base 39: mod_base = gm
  modified_base 40: mod_base = cm
  modified_base 69: mod_base = OTHER; note = 2' methyl adenosine
  modified_base 70: mod_base = cm
  modified_base 71..72: mod_base = um
  modified_base 73: mod_base = gm
  modified_base 74..78: mod_base = OTHER; note = 2' methyl adenosine
  modified_base 79: mod_base = gm
  modified_base 80: mod_base = um
  modified_base 81..82: mod_base = gm
  modified_base 83: mod_base = cm
  modified_base 84: mod_base = OTHER; note = 2' methyl adenosine
  modified_base 85..86: mod_base = cm
  modified_base 87: mod_base = gm
  modified_base 88: mod_base = OTHER; note = 2' methyl adenosine
  modified_base 89: mod_base = gm
  modified_base 90: mod_base = um
  modified_base 91: mod_base = cm
  modified_base 92..93: mod_base = gm
  modified_base 94: mod_base = um
  modified_base 95: mod_base = gm
  modified_base 96: mod_base = cm
  modified_base 97..100: mod_base = um
  misc_feature 97..100: note = Phosphorothiate linkage

SEQ ID NO: 233 - RNA, 100 nt, synthetic construct; identical to SEQ ID NO: 200
  source 1..100: mol_type = other RNA
  misc_feature 1..4: note = Phosphorothiate linkage
  modified_base 1..2: mod_base = cm
  modified_base 3: mod_base = um
  modified_base 29: mod_base = gm
  modified_base 30: mod_base = cm
  modified_base 31: mod_base = um
  modified_base 32: mod_base = OTHER; note = 2' methyl adenosine
  modified_base 33: mod_base = gm
  modified_base 34..36: mod_base = OTHER; note = 2' methyl adenosine
  modified_base 37: mod_base = um
  modified_base 38: mod_base = OTHER; note = 2' methyl adenosine
  modified_base 39: mod_base = gm
  modified_base 40: mod_base = cm
  modified_base 69: mod_base = OTHER; note = 2' methyl adenosine
  modified_base 70: mod_base = cm
  modified_base 71..72: mod_base = um
  modified_base 73: mod_base = gm
  modified_base 74..78: mod_base = OTHER; note = 2' methyl adenosine
  modified_base 79: mod_base = gm
  modified_base 80: mod_base = um
  modified_base 81..82: mod_base = gm
  modified_base 83: mod_base = cm
  modified_base 84: mod_base = OTHER; note = 2' methyl adenosine
  modified_base 85..86: mod_base = cm
  modified_base 87: mod_base = gm
  modified_base 88: mod_base = OTHER; note = 2' methyl adenosine
  modified_base 89: mod_base = gm
  modified_base 90: mod_base = um
  modified_base 91: mod_base = cm
  modified_base 92..93: mod_base = gm
  modified_base 94: mod_base = um
  modified_base 95: mod_base = gm
  modified_base 96: mod_base = cm
  modified_base 97..100: mod_base = um
  misc_feature 97..100: note = Phosphorothiate linkage

SEQ ID NO: 234 - RNA, 100 nt, synthetic construct; identical to SEQ ID NO: 201
  source 1..100: mol_type = other RNA
  misc_feature 1..4: note = Phosphorothiate linkage
  modified_base 1: mod_base = cm
  modified_base 2: mod_base = um
  modified_base 3: mod_base = cm
  modified_base 29: mod_base = gm
  modified_base 30: mod_base = cm
  modified_base 31: mod_base = um
  modified_base 32: mod_base = OTHER; note = 2' methyl adenosine
  modified_base 33: mod_base = gm
  modified_base 34..36: mod_base = OTHER; note = 2' methyl adenosine
  modified_base 37: mod_base = um
  modified_base 38: mod_base = OTHER; note = 2' methyl adenosine
  modified_base 39: mod_base = gm
  modified_base 40: mod_base = cm
  modified_base 69: mod_base = OTHER; note = 2' methyl adenosine
  modified_base 70: mod_base = cm
  modified_base 71..72: mod_base = um
  modified_base 73: mod_base = gm
  modified_base 74..78: mod_base = OTHER; note = 2' methyl adenosine
  modified_base 79: mod_base = gm
  modified_base 80: mod_base = um
  modified_base 81..82: mod_base = gm
  modified_base 83: mod_base = cm
  modified_base 84: mod_base = OTHER; note = 2' methyl adenosine
  modified_base 85..86: mod_base = cm
  modified_base 87: mod_base = gm
  modified_base 88: mod_base = OTHER; note = 2' methyl adenosine
  modified_base 89: mod_base = gm
  modified_base 90: mod_base = um
  modified_base 91: mod_base = cm
  modified_base 92..93: mod_base = gm
  modified_base 94: mod_base = um
  modified_base 95: mod_base = gm
  modified_base 96: mod_base = cm
  modified_base 97..100: mod_base = um
  misc_feature 97..100: note = Phosphorothiate linkage

SEQ ID NO: 235 - RNA, 100 nt, synthetic construct; identical to SEQ ID NO: 202
  source 1..100: mol_type = other RNA
  misc_feature 1..4: note = Phosphorothiate linkage
  modified_base 1: mod_base = gm
  modified_base 29: mod_base = gm
  modified_base 30: mod_base = cm
  modified_base 31: mod_base = um
  modified_base 32: mod_base = OTHER; note = 2' methyl adenosine
  modified_base 33: mod_base = gm
  modified_base 34..36: mod_base = OTHER; note = 2' methyl adenosine
  modified_base 37: mod_base = um
  modified_base 38: mod_base = OTHER; note = 2' methyl adenosine
  modified_base 39: mod_base = gm
  modified_base 40: mod_base = cm
  modified_base 69: mod_base = OTHER; note = 2' methyl adenosine
  modified_base 70: mod_base = cm
  modified_base 71..72: mod_base = um
  modified_base 73: mod_base = gm
  modified_base 74..78: mod_base = OTHER; note = 2' methyl adenosine
  modified_base 79: mod_base = gm
  modified_base 80: mod_base = um
  modified_base 81..82: mod_base = gm
  modified_base 83: mod_base = cm
  modified_base 84: mod_base = OTHER; note = 2' methyl adenosine
  modified_base 85..86: mod_base = cm
  modified_base 87: mod_base = gm
  modified_base 88: mod_base = OTHER; note = 2' methyl adenosine
  modified_base 89: mod_base = gm
  modified_base 90: mod_base = um
  modified_base 91: mod_base = cm
  modified_base 92..93: mod_base = gm
  modified_base 94: mod_base = um
  modified_base 95: mod_base = gm
  modified_base 96: mod_base = cm
  modified_base 97..100: mod_base = um
  misc_feature 97..100: note = Phosphorothiate linkage

SEQ ID NO: 236 - RNA, 100 nt, synthetic construct; identical to SEQ ID NO: 203
  source 1..100: mol_type = other RNA
  misc_feature 1..4: note = Phosphorothiate linkage
  modified_base 1..3: mod_base = gm
  modified_base 29: mod_base = gm
  modified_base 30: mod_base = cm
  modified_base 31: mod_base = um
  modified_base 32: mod_base = OTHER; note = 2' methyl adenosine
  modified_base 33: mod_base = gm
  modified_base 34..36: mod_base = OTHER; note = 2' methyl adenosine
  modified_base 37: mod_base = um
  modified_base 38: mod_base = OTHER; note = 2' methyl adenosine
  modified_base 39: mod_base = gm
  modified_base 40: mod_base = cm
  modified_base 69: mod_base = OTHER; note = 2' methyl adenosine
  modified_base 70: mod_base = cm
  modified_base 71..72: mod_base = um
  modified_base 73: mod_base = gm
  modified_base 74..78: mod_base = OTHER; note = 2' methyl adenosine
  modified_base 79: mod_base = gm
  modified_base 80: mod_base = um
  modified_base 81..82: mod_base = gm
  modified_base 83: mod_base = cm
  modified_base 84: mod_base = OTHER; note = 2' methyl adenosine
  modified_base 85..86: mod_base = cm
  modified_base 87: mod_base = gm
  modified_base 88: mod_base = OTHER; note = 2' methyl adenosine
  modified_base 89: mod_base = gm
  modified_base 90: mod_base = um
  modified_base 91: mod_base = cm
  modified_base 92..93: mod_base = gm
  modified_base 94: mod_base = um
  modified_base 95: mod_base = gm
  modified_base 96: mod_base = cm
  modified_base 97..100: mod_base = um
  misc_feature 97..100: note = Phosphorothiate linkage

SEQ ID NO: 237-238 - skipped (2 entries)

SEQ ID NO: 239 - RNA, 100 nt, synthetic construct; identical to SEQ ID NO: 206
  source 1..100: mol_type = other RNA
  misc_feature 1..4: note = Phosphorothiate linkage
  modified_base 1: mod_base = um
  modified_base 2: mod_base = gm
  modified_base 3: mod_base = OTHER; note = 2' methyl adenosine
  modified_base 29: mod_base = gm
  modified_base 30: mod_base = cm
  modified_base 31: mod_base = um
  modified_base 32: mod_base = OTHER; note = 2' methyl adenosine
  modified_base 33: mod_base = gm
  modified_base 34..36: mod_base = OTHER; note = 2' methyl adenosine
  modified_base 37: mod_base = um
  modified_base 38: mod_base = OTHER; note = 2' methyl adenosine
  modified_base 39: mod_base = gm
  modified_base 40: mod_base = cm
  modified_base 69: mod_base = OTHER; note = 2' methyl adenosine
  modified_base 70: mod_base = cm
  modified_base 71..72: mod_base = um
  modified_base 73: mod_base = gm
  modified_base 74..78: mod_base = OTHER; note = 2' methyl adenosine
  modified_base 79: mod_base = gm
  modified_base 80: mod_base = um
  modified_base 81..82: mod_base = gm
  modified_base 83: mod_base = cm
  modified_base 84: mod_base = OTHER; note = 2' methyl adenosine
  modified_base 85..86: mod_base = cm
  modified_base 87: mod_base = gm
  modified_base 88: mod_base = OTHER; note = 2' methyl adenosine
  modified_base 89: mod_base = gm
  modified_base 90: mod_base = um
  modified_base 91: mod_base = cm
  modified_base 92..93: mod_base = gm
  modified_base 94: mod_base = um
  modified_base 95: mod_base = gm
  modified_base 96: mod_base = cm
  modified_base 97..100: mod_base = um
  misc_feature 97..100: note = Phosphorothiate linkage

SEQ ID NO: 240 - RNA, 100 nt, synthetic construct; identical to SEQ ID NO: 207
  source 1..100: mol_type = other RNA
  misc_feature 1..4: note = Phosphorothiate linkage
  modified_base 1: mod_base = um
  modified_base 2: mod_base = OTHER; note = 2' methyl adenosine
  modified_base 3: mod_base = cm
  modified_base 29: mod_base = gm
  modified_base 30: mod_base = cm
  modified_base 31: mod_base = um
  modified_base 32: mod_base = OTHER; note = 2' methyl adenosine
  modified_base 33: mod_base = gm
  modified_base 34..36: mod_base = OTHER; note = 2' methyl adenosine
  modified_base 37: mod_base = um
  modified_base 38: mod_base = OTHER; note = 2' methyl adenosine
  modified_base 39: mod_base = gm
  modified_base 40: mod_base = cm
  modified_base 69: mod_base = OTHER; note = 2' methyl adenosine
  modified_base 70: mod_base = cm
  modified_base 71..72: mod_base = um
  modified_base 73: mod_base = gm
  modified_base 74..78: mod_base = OTHER; note = 2' methyl adenosine
  modified_base 79: mod_base = gm
  modified_base 80: mod_base = um
  modified_base 81..82: mod_base = gm
  modified_base 83: mod_base = cm
  modified_base 84: mod_base = OTHER; note = 2' methyl adenosine
  modified_base 85..86: mod_base = cm
  modified_base 87: mod_base = gm
  modified_base 88: mod_base = OTHER; note = 2' methyl adenosine
  modified_base 89: mod_base = gm
  modified_base 90: mod_base = um
  modified_base 91: mod_base = cm
  modified_base 92..93: mod_base = gm
  modified_base 94: mod_base = um
  modified_base 95: mod_base = gm
  modified_base 96: mod_base = cm
  modified_base 97..100: mod_base = um
  misc_feature 97..100: note = Phosphorothiate linkage

SEQ ID NO: 241 - RNA, 100 nt, synthetic construct; identical to SEQ ID NO: 208
  source 1..100: mol_type = other RNA
  misc_feature 1..4: note = Phosphorothiate linkage
  modified_base 1..3: mod_base = um
  modified_base 29: mod_base = gm
  modified_base 30: mod_base = cm
  modified_base 31: mod_base = um
  modified_base 32: mod_base = OTHER; note = 2' methyl adenosine
  modified_base 33: mod_base = gm
  modified_base 34..36: mod_base = OTHER; note = 2' methyl adenosine
  modified_base 37: mod_base = um
  modified_base 38: mod_base = OTHER; note = 2' methyl adenosine
  modified_base 39: mod_base = gm
  modified_base 40: mod_base = cm
  modified_base 69: mod_base = OTHER; note = 2' methyl adenosine
  modified_base 70: mod_base = cm
  modified_base 71..72: mod_base = um
  modified_base 73: mod_base = gm
  modified_base 74..78: mod_base = OTHER; note = 2' methyl adenosine
  modified_base 79: mod_base = gm
  modified_base 80: mod_base = um
  modified_base 81..82: mod_base = gm
  modified_base 83: mod_base = cm
  modified_base 84: mod_base = OTHER; note = 2' methyl adenosine
  modified_base 85..86: mod_base = cm
  modified_base 87: mod_base = gm
  modified_base 88: mod_base = OTHER; note = 2' methyl adenosine
  modified_base 89: mod_base = gm
  modified_base 90: mod_base = um
  modified_base 91: mod_base = cm
  modified_base 92..93: mod_base = gm
  modified_base 94: mod_base = um
  modified_base 95: mod_base = gm
  modified_base 96: mod_base = cm
  modified_base 97..100: mod_base = um
  misc_feature 97..100: note = Phosphorothiate linkage

SEQ ID NO: 242 - RNA, 100 nt, synthetic construct; identical to SEQ ID NO: 209
  source 1..100: mol_type = other RNA
  misc_feature 1..4: note = Phosphorothiate linkage
  modified_base 1..2: mod_base = um
  modified_base 3: mod_base = OTHER; note = 2' methyl adenosine
  modified_base 29: mod_base = gm
  modified_base 30: mod_base = cm
  modified_base 31: mod_base = um
  modified_base 32: mod_base = OTHER; note = 2' methyl adenosine
  modified_base 33: mod_base = gm
  modified_base 34..36: mod_base = OTHER; note = 2' methyl adenosine
  modified_base 37: mod_base = um
  modified_base 38: mod_base = OTHER; note = 2' methyl adenosine
  modified_base 39: mod_base = gm
  modified_base 40: mod_base = cm
  modified_base 69: mod_base = OTHER; note = 2' methyl adenosine
  modified_base 70: mod_base = cm
  modified_base 71..72: mod_base = um
  modified_base 73: mod_base = gm
  modified_base 74..78: mod_base = OTHER; note = 2' methyl adenosine
  modified_base 79: mod_base = gm
  modified_base 80: mod_base = um
  modified_base 81..82: mod_base = gm
  modified_base 83: mod_base = cm
  modified_base 84: mod_base = OTHER; note = 2' methyl adenosine
  modified_base 85..86: mod_base = cm
  modified_base 87: mod_base = gm
  modified_base 88: mod_base = OTHER; note = 2' methyl adenosine
  modified_base 89: mod_base = gm
  modified_base 90: mod_base = um
  modified_base 91: mod_base = cm
  modified_base 92..93: mod_base = gm
  modified_base 94: mod_base = um
  modified_base 95: mod_base = gm
  modified_base 96: mod_base = cm
  modified_base 97..100: mod_base = um
  misc_feature 97..100: note = Phosphorothiate linkage

SEQ ID NO: 243-247 - skipped (5 entries)

SEQ ID NO: 248 - RNA, 100 nt, synthetic construct; identical to SEQ ID NO: 215
  source 1..100: mol_type = other RNA
  misc_feature 1..4: note = Phosphorothiate linkage
  modified_base 1: mod_base = OTHER; note = 2' methyl adenosine
  modified_base 2: mod_base = gm
  modified_base 3: mod_base = um
  modified_base 29: mod_base = gm
  modified_base 30: mod_base = cm
  modified_base 31: mod_base = um
  modified_base 32: mod_base = OTHER; note = 2' methyl adenosine
  modified_base 33: mod_base = gm
  modified_base 34..36: mod_base = OTHER; note = 2' methyl adenosine
  modified_base 37: mod_base = um
  modified_base 38: mod_base = OTHER; note = 2' methyl adenosine
  modified_base 39: mod_base = gm
  modified_base 40: mod_base = cm
  modified_base 69: mod_base = OTHER; note = 2' methyl adenosine
  modified_base 70: mod_base = cm
  modified_base 71..72: mod_base = um
  modified_base 73: mod_base = gm
  modified_base 74..78: mod_base = OTHER; note = 2' methyl adenosine
  modified_base 79: mod_base = gm
  modified_base 80: mod_base = um
  modified_base 81..82: mod_base = gm
  modified_base 83: mod_base = cm
  modified_base 84: mod_base = OTHER; note = 2' methyl adenosine
  modified_base 85..86: mod_base = cm
  modified_base 87: mod_base = gm
  modified_base 88: mod_base = OTHER; note = 2' methyl adenosine
  modified_base 89: mod_base = gm
  modified_base 90: mod_base = um
  modified_base 91: mod_base = cm
  modified_base 92..93: mod_base = gm
  modified_base 94: mod_base = um
  modified_base 95: mod_base = gm
  modified_base 96: mod_base = cm
  modified_base 97..100: mod_base = um
  misc_feature 97..100: note = Phosphorothiate linkage

SEQ ID NO: 249 - RNA, 100 nt, synthetic construct; identical to SEQ ID NO: 216
  source 1..100: mol_type = other RNA
  misc_feature 1..4: note = Phosphorothiate linkage
  modified_base 1..2: mod_base = um
  modified_base 3: mod_base = OTHER; note = 2' methyl adenosine
  modified_base 29: mod_base = gm
  modified_base 30: mod_base = cm
  modified_base 31: mod_base = um
  modified_base 32: mod_base = OTHER; note = 2' methyl adenosine
  modified_base 33: mod_base = gm
  modified_base 34..36: mod_base = OTHER; note = 2' methyl adenosine
  modified_base 37: mod_base = um
  modified_base 38: mod_base = OTHER; note = 2' methyl adenosine
  modified_base 39: mod_base = gm
  modified_base 40: mod_base = cm
  modified_base 69: mod_base = OTHER; note = 2' methyl adenosine
  modified_base 70: mod_base = cm
  modified_base 71..72: mod_base = um
  modified_base 73: mod_base = gm
  modified_base 74..78: mod_base = OTHER; note = 2' methyl adenosine
  modified_base 79: mod_base = gm
  modified_base 80: mod_base = um
  modified_base 81..82: mod_base = gm
  modified_base 83: mod_base = cm
  modified_base 84: mod_base = OTHER; note = 2' methyl adenosine
  modified_base 85..86: mod_base = cm
  modified_base 87: mod_base = gm
  modified_base 88: mod_base = OTHER; note = 2' methyl adenosine
  modified_base 89: mod_base = gm
  modified_base 90: mod_base = um
  modified_base 91: mod_base = cm
  modified_base 92..93: mod_base = gm
  modified_base 94: mod_base = um
  modified_base 95: mod_base = gm
  modified_base 96: mod_base = cm
  modified_base 97..100: mod_base = um
  misc_feature 97..100: note = Phosphorothiate linkage

SEQ ID NO: 250 - RNA, 100 nt, synthetic construct; identical to SEQ ID NO: 217
  source 1..100: mol_type = other RNA
  misc_feature 1..4: note = Phosphorothiate linkage
  modified_base 1: mod_base = um
  modified_base 2: mod_base = OTHER; note = 2' methyl adenosine
  modified_base 3: mod_base = cm
  modified_base 29: mod_base = gm
  modified_base 30: mod_base = cm
  modified_base 31: mod_base = um
  modified_base 32: mod_base = OTHER; note = 2' methyl adenosine
  modified_base 33: mod_base = gm
  modified_base 34..36: mod_base = OTHER; note = 2' methyl adenosine
  modified_base 37: mod_base = um
  modified_base 38: mod_base = OTHER; note = 2' methyl adenosine
  modified_base 39: mod_base = gm
  modified_base 40: mod_base = cm
  modified_base 69: mod_base = OTHER; note = 2' methyl adenosine
  modified_base 70: mod_base = cm
  modified_base 71..72: mod_base = um
  modified_base 73: mod_base = gm
  modified_base 74..78: mod_base = OTHER; note = 2' methyl adenosine
  modified_base 79: mod_base = gm
  modified_base 80: mod_base = um
  modified_base 81..82: mod_base = gm
  modified_base 83: mod_base = cm
  modified_base 84: mod_base = OTHER; note = 2' methyl adenosine
  modified_base 85..86: mod_base = cm
  modified_base 87: mod_base = gm
  modified_base 88: mod_base = OTHER; note = 2' methyl adenosine
  modified_base 89: mod_base = gm
  modified_base 90: mod_base = um
  modified_base 91: mod_base = cm
  modified_base 92..93: mod_base = gm
  modified_base 94: mod_base = um
  modified_base 95: mod_base = gm
  modified_base 96: mod_base = cm
  modified_base 97..100: mod_base = um
  misc_feature 97..100: note = Phosphorothiate linkage

SEQ ID NO: 251 - RNA, 100 nt, synthetic construct; identical to SEQ ID NO: 218
  source 1..100: mol_type = other RNA
  misc_feature 1..4: note = Phosphorothiate linkage
  modified_base 1: mod_base = um
  modified_base 2: mod_base = cm
  modified_base 3: mod_base = um
  modified_base 29: mod_base = gm
  modified_base 30: mod_base = cm
  modified_base 31: mod_base = um
  modified_base 32: mod_base = OTHER; note = 2' methyl adenosine
  modified_base 33: mod_base = gm
  modified_base 34..36: mod_base = OTHER; note = 2' methyl adenosine
  modified_base 37: mod_base = um
  modified_base 38: mod_base = OTHER; note = 2' methyl adenosine
  modified_base 39: mod_base = gm
  modified_base 40: mod_base = cm
  modified_base 69: mod_base = OTHER; note = 2' methyl adenosine
  modified_base 70: mod_base = cm
  modified_base 71..72: mod_base = um
  modified_base 73: mod_base = gm
  modified_base 74..78: mod_base = OTHER; note = 2' methyl adenosine
  modified_base 79: mod_base = gm
  modified_base 80: mod_base = um
  modified_base 81..82: mod_base = gm
  modified_base 83: mod_base = cm
  modified_base 84: mod_base = OTHER; note = 2' methyl adenosine
  modified_base 85..86: mod_base = cm
  modified_base 87: mod_base = gm
  modified_base 88: mod_base = OTHER; note = 2' methyl adenosine
  modified_base 89: mod_base = gm
  modified_base 90: mod_base = um
  modified_base 91: mod_base = cm
  modified_base 92..93: mod_base = gm
  modified_base 94: mod_base = um
  modified_base 95: mod_base = gm
  modified_base 96: mod_base = cm
  modified_base 97..100: mod_base = um
  misc_feature 97..100: note = Phosphorothiate linkage

SEQ ID NO: 252-254 - skipped (3 entries)

SEQ ID NO: 255 - RNA, 100 nt, synthetic construct; identical to SEQ ID NO: 222
  source 1..100: mol_type = other RNA
  misc_feature 1..4: note = Phosphorothiate linkage
  modified_base 32: mod_base = OTHER; note = 2' methyl adenosine
  modified_base 2..3: mod_base = um
  modified_base 29: mod_base = gm
  modified_base 30: mod_base = cm
  modified_base 31: mod_base = um
  modified_base 32: mod_base = OTHER; note = 2' methyl adenosine
  modified_base 33: mod_base = gm
  modified_base 34..36: mod_base = OTHER; note = 2' methyl adenosine
  modified_base 37: mod_base = um
  modified_base 38: mod_base = OTHER; note = 2' methyl adenosine
  modified_base 39: mod_base = gm
  modified_base 40: mod_base = cm
  modified_base 69: mod_base = OTHER; note = 2' methyl adenosine
  modified_base 70: mod_base = cm
  modified_base 71..72: mod_base = um
  modified_base 73: mod_base = gm
  modified_base 74..78: mod_base = OTHER; note = 2' methyl adenosine
  modified_base 79: mod_base = gm
  modified_base 80: mod_base = um
  modified_base 81..82: mod_base = gm
  modified_base 83: mod_base = cm
  modified_base 84: mod_base = OTHER; note = 2' methyl adenosine
  modified_base 85..86: mod_base = cm
  modified_base 87: mod_base = gm
  modified_base 88: mod_base = OTHER; note = 2' methyl adenosine
  modified_base 89: mod_base = gm
  modified_base 90: mod_base = um
  modified_base 91: mod_base = cm
  modified_base 92..93: mod_base = gm
  modified_base 94: mod_base = um
  modified_base 95: mod_base = gm
  modified_base 96: mod_base = cm
  modified_base 97..100: mod_base = um
  misc_feature 97..100: note = Phosphorothiate linkage

SEQ ID NO: 256 - RNA, 100 nt, synthetic construct; identical to SEQ ID NO: 223
  source 1..100: mol_type = other RNA
  misc_feature 1..4: note = Phosphorothiate linkage
  modified_base 1: mod_base = um
  modified_base 2: mod_base = gm
  modified_base 3: mod_base = OTHER; note = 2' methyl adenosine
  modified_base 29: mod_base = gm
  modified_base 30: mod_base = cm
  modified_base 31: mod_base = um
  modified_base 32: mod_base = OTHER; note = 2' methyl adenosine
  modified_base 33: mod_base = gm
  modified_base 34..36: mod_base = OTHER; note = 2' methyl adenosine
  modified_base 37: mod_base = um
  modified_base 38: mod_base = OTHER; note = 2' methyl adenosine
  modified_base 39: mod_base = gm
  modified_base 40: mod_base = cm
  modified_base 69: mod_base = OTHER; note = 2' methyl adenosine
  modified_base 70: mod_base = cm
  modified_base 71..72: mod_base = um
  modified_base 73: mod_base = gm
  modified_base 74..78: mod_base = OTHER; note = 2' methyl adenosine
  modified_base 79: mod_base = gm
  modified_base 80: mod_base = um
  modified_base 81..82: mod_base = gm
  modified_base 83: mod_base = cm
  modified_base 84: mod_base = OTHER; note = 2' methyl adenosine
  modified_base 85..86: mod_base = cm
  modified_base 87: mod_base = gm
  modified_base 88: mod_base = OTHER; note = 2' methyl adenosine
  modified_base 89: mod_base = gm
  modified_base 90: mod_base = um
  modified_base 91: mod_base = cm
  modified_base 92..93: mod_base = gm
  modified_base 94: mod_base = um
  modified_base 95: mod_base = gm
  modified_base 96: mod_base = cm
  modified_base 97..100: mod_base = um
  misc_feature 97..100: note = Phosphorothiate linkage

SEQ ID NO: 257 - RNA, 100 nt, synthetic construct; identical to SEQ ID NO: 224
  source 1..100: mol_type = other RNA
  misc_feature 1..4: note = Phosphorothiate linkage
  modified_base 1: mod_base = um
  modified_base 2..3: mod_base = OTHER; note = 2' methyl adenosine
  modified_base 29: mod_base = gm
  modified_base 30: mod_base = cm
  modified_base 31: mod_base = um
  modified_base 32: mod_base = OTHER; note = 2' methyl adenosine
  modified_base 33: mod_base = gm
  modified_base 34..36: mod_base = OTHER; note = 2' methyl adenosine
  modified_base 37: mod_base = um
  modified_base 38: mod_base = OTHER; note = 2' methyl adenosine
  modified_base 39: mod_base = gm
  modified_base 40: mod_base = cm
  modified_base 69: mod_base = OTHER; note = 2' methyl adenosine
  modified_base 70: mod_base = cm
  modified_base 71..72: mod_base = um
  modified_base 73: mod_base = gm
  modified_base 74..78: mod_base = OTHER; note = 2' methyl adenosine
  modified_base 79: mod_base = gm
  modified_base 80: mod_base = um
  modified_base 81..82: mod_base = gm
  modified_base 83: mod_base = cm
  modified_base 84: mod_base = OTHER; note = 2' methyl adenosine
  modified_base 85..86: mod_base = cm
  modified_base 87: mod_base = gm
  modified_base 88: mod_base = OTHER; note = 2' methyl adenosine
  modified_base 89: mod_base = gm
  modified_base 90: mod_base = um
  modified_base 91: mod_base = cm
  modified_base 92..93: mod_base = gm
  modified_base 94: mod_base = um
  modified_base 95: mod_base = gm
  modified_base 96: mod_base = cm
  modified_base 97..100: mod_base = um
  misc_feature 97..100: note = Phosphorothiate linkage

SEQ ID NO: 258 - RNA, 100 nt, synthetic construct; identical to SEQ ID NO: 225
  source 1..100: mol_type = other RNA
  misc_feature 1..4: note = Phosphorothiate linkage
  modified_base 1..3: mod_base = OTHER; note = 2' methyl adenosine
  modified_base 29: mod_base = gm
  modified_base 30: mod_base = cm
  modified_base 31: mod_base = um
  modified_base 32: mod_base = OTHER; note = 2' methyl adenosine
  modified_base 33: mod_base = gm
  modified_base 34..36: mod_base = OTHER; note = 2' methyl adenosine
  modified_base 37: mod_base = um
  modified_base 38: mod_base = OTHER; note = 2' methyl adenosine
  modified_base 39: mod_base = gm
  modified_base 40: mod_base = cm
  modified_base 69: mod_base = OTHER; note = 2' methyl adenosine
  modified_base 70: mod_base = cm
  modified_base 71..72: mod_base = um
  modified_base 73: mod_base = gm
  modified_base 74..78: mod_base = OTHER; note = 2' methyl adenosine
  modified_base 79: mod_base = gm
  modified_base 80: mod_base = um
  modified_base 81..82: mod_base = gm
  modified_base 83: mod_base = cm
  modified_base 84: mod_base = OTHER; note = 2' methyl adenosine
  modified_base 85..86: mod_base = cm
  modified_base 87: mod_base = gm
  modified_base 88: mod_base = OTHER; note = 2' methyl adenosine
  modified_base 89: mod_base = gm
  modified_base 90: mod_base = um
  modified_base 91: mod_base = cm
  modified_base 92..93: mod_base = gm
  modified_base 94: mod_base = um
  modified_base 95: mod_base = gm
  modified_base 96: mod_base = cm
  modified_base 97..100: mod_base = um
  misc_feature 97..100: note = Phosphorothiate linkage

SEQ ID NO: 259 - RNA, 100 nt, synthetic construct; identical to SEQ ID NO: 226
  source 1..100: mol_type = other RNA
  misc_feature 1..4: note = Phosphorothiate linkage
  modified_base 1..2: mod_base = OTHER; note = 2' methyl adenosine
  modified_base 3: mod_base = cm
  modified_base 29: mod_base = gm
  modified_base 30: mod_base = cm
  modified_base 31: mod_base = um
  modified_base 32: mod_base = OTHER; note = 2' methyl adenosine
  modified_base 33: mod_base = gm
  modified_base 34..36: mod_base = OTHER; note = 2' methyl adenosine
  modified_base 37: mod_base = um
  modified_base 38: mod_base = OTHER; note = 2' methyl adenosine
  modified_base 39: mod_base = gm
  modified_base 40: mod_base = cm
  modified_base 69: mod_base = OTHER; note = 2' methyl adenosine
  modified_base 70: mod_base = cm
  modified_base 71..72: mod_base = um
  modified_base 73: mod_base = gm
  modified_base 74..78: mod_base = OTHER; note = 2' methyl adenosine
  modified_base 79: mod_base = gm
  modified_base 80: mod_base = um
  modified_base 81..82: mod_base = gm
  modified_base 83: mod_base = cm
  modified_base 84: mod_base = OTHER; note = 2' methyl adenosine
  modified_base 85..86: mod_base = cm
  modified_base 87: mod_base = gm
  modified_base 88: mod_base = OTHER; note = 2' methyl adenosine
  modified_base 89: mod_base = gm
  modified_base 90: mod_base = um
  modified_base 91: mod_base = cm
  modified_base 92..93: mod_base = gm
  modified_base 94: mod_base = um
  modified_base 95: mod_base = gm
  modified_base 96: mod_base = cm
  modified_base 97..100: mod_base = um
  misc_feature 97..100: note = Phosphorothiate linkage

SEQ ID NO: 260 - skipped

SEQ ID NO: 261 - RNA, 100 nt, synthetic construct; identical to SEQ ID NO: 228
  source 1..100: mol_type = other RNA
  misc_feature 1..4: note = Phosphorothiate linkage
  modified_base 1..2: mod_base = um
  modified_base 3: mod_base = gm
  modified_base 29: mod_base = gm
  modified_base 30: mod_base = cm
  modified_base 31: mod_base = um
  modified_base 32: mod_base = OTHER; note = 2' methyl adenosine
  modified_base 33: mod_base = gm
  modified_base 34..36: mod_base = OTHER; note = 2' methyl adenosine
  modified_base 37: mod_base = um
  modified_base 38: mod_base = OTHER; note = 2' methyl adenosine
  modified_base 39: mod_base = gm
  modified_base 40: mod_base = cm
  modified_base 69: mod_base = OTHER; note = 2' methyl adenosine
  modified_base 70: mod_base = cm
  modified_base 71..72: mod_base = um
  modified_base 73: mod_base = gm
  modified_base 74..78: mod_base = OTHER; note = 2' methyl adenosine
  modified_base 79: mod_base = gm
  modified_base 80: mod_base = um
  modified_base 81..82: mod_base = gm
  modified_base 83: mod_base = cm
  modified_base 84: mod_base = OTHER; note = 2' methyl adenosine
  modified_base 85..86: mod_base = cm
  modified_base 87: mod_base = gm
  modified_base 88: mod_base = OTHER; note = 2' methyl adenosine
  modified_base 89: mod_base = gm
  modified_base 90: mod_base = um
  modified_base 91: mod_base = cm
  modified_base 92..93: mod_base = gm
  modified_base 94: mod_base = um
  modified_base 95: mod_base = gm
  modified_base 96: mod_base = cm
  modified_base 97..100: mod_base = um
  misc_feature 97..100: note = Phosphorothiate linkage

SEQ ID NO: 262 - RNA, 100 nt, synthetic construct; identical to SEQ ID NO: 229
  source 1..100: mol_type = other RNA
  modified_base 1..3: mod_base = um
  modified_base 29: mod_base = gm
  modified_base 30: mod_base = cm
  modified_base 31: mod_base = um
  modified_base 32: mod_base = OTHER; note = 2' methyl adenosine
  modified_base 33: mod_base = gm
  modified_base 34..36: mod_base = OTHER; note = 2' methyl adenosine
  modified_base 37: mod_base = um
  modified_base 38: mod_base = OTHER; note = 2' methyl adenosine
  modified_base 39: mod_base = gm
  modified_base 40: mod_base = cm
  modified_base 69: mod_base = OTHER; note = 2' methyl adenosine
  modified_base 70: mod_base = cm
  modified_base 71..72: mod_base = um
  modified_base 73: mod_base = gm
  modified_base 74..78: mod_base = OTHER; note = 2' methyl adenosine
  modified_base 79: mod_base = gm
  modified_base 80: mod_base = um
  modified_base 81..82: mod_base = gm
  modified_base 83: mod_base = cm
  modified_base 84: mod_base = OTHER; note = 2' methyl adenosine
  modified_base 85..86: mod_base = cm
  modified_base 87: mod_base = gm
  modified_base 88: mod_base = OTHER; note = 2' methyl adenosine
  modified_base 89: mod_base = gm
  modified_base 90: mod_base = um
  modified_base 91: mod_base = cm
  modified_base 92..93: mod_base = gm
  modified_base 94: mod_base = um
  modified_base 95: mod_base = gm
  modified_base 96: mod_base = cm
  modified_base 97..100: mod_base = um
  misc_feature 97..100: note = Phosphorothiate linkage

SEQ ID NO: 263-299 - skipped (37 entries)

SEQ ID NO: 300 - RNA, 100 nt, synthetic construct
  source 1..100: mol_type = other RNA
  misc_feature 1..4: note = Phosphorothiate linkage
  modified_base 1..20: mod_base = OTHER; note = Any natural or non-natural nucleotide
  modified_base 29: mod_base = gm
  modified_base 30: mod_base = cm
  modified_base 31: mod_base = um
  modified_base 32: mod_base = OTHER; note = 2' methyl adenosine
  modified_base 33: mod_base = gm
  modified_base 34..36: mod_base = OTHER; note = 2' methyl adenosine
  modified_base 37: mod_base = um
  modified_base 38: mod_base = OTHER; note = 2' methyl adenosine
  modified_base 39: mod_base = gm
  modified_base 40: mod_base = cm
  modified_base 69: mod_base = OTHER; note = 2' methyl adenosine
  modified_base 70: mod_base = cm
  modified_base 71..72: mod_base = um
  modified_base 73: mod_base = gm
  modified_base 74..78: mod_base = OTHER; note = 2' methyl adenosine
  modified_base 79: mod_base = gm
  modified_base 80: mod_base = um
  modified_base 81..82: mod_base = gm
  modified_base 83: mod_base = cm
  modified_base 84: mod_base = OTHER; note = 2' methyl adenosine
  modified_base 85..86: mod_base = cm
  modified_base 87: mod_base = gm
  modified_base 88: mod_base = OTHER; note = 2' methyl adenosine
  modified_base 89: mod_base = gm
  modified_base 90: mod_base = um
  modified_base 91: mod_base = cm
  modified_base 92..93: mod_base = gm
  modified_base 94: mod_base = um
  modified_base 95: mod_base = gm
  modified_base 96: mod_base = cm
  modified_base 97..100: mod_base = um
  misc_feature 97..100: note = Phosphorothiate linkage
nnnnnnnnnnnnnnnnnnnngttttagagctagaaatagcaagttaaaataaggctagtccgttatcaacttgaaaaagtggcaccgagtcggtgctttt

SEQ ID NO: 301-599 - skipped (299 entries)

SEQ ID NO: 600 - protein, 7 aa, Simianvirus40
PKKKRKV

SEQ ID NO: 601 - protein, 7 aa, Simianvirus40
PKKKRRV

SEQ ID NO: 602 - protein, 16 aa, unidentifiedNLSofnucleoplasmin
KRPAATKKAGQAKKKK

SEQ ID NO: 603-699 - skipped (97 entries)

SEQ ID NO: 700 - protein, 418 aa, Homo sapiens
MPSSVSWGILLLAGLCCLVPVSLAEDPQGDAAQKTDTSHHDQDHPTFNKITPNLAEFAFSLYRQLAHQSNSTNIFFSPVSIATAFAMLSLGTKADTHDEILEGLNFNLTEIPEAQIHEGFQELLRTLNQPDSQLQLTTGNGLFLSEGLKLVDKFLEDVKKLYHSEAFTVNFGDTEEAKKQINDYVEKGTQGKIVDLVKELDRDTVFALVNYIFFKGKWERPFEVKDTEEEDFHVDQVTTVKVPMMKRLGMFNIQHCKKLSSWVLLMKYLGNATAIFFLPDEGKLQHLENELTHDIITKFLENEDRRSASLHLPKLSITGTYDLKSVLGQLGITKVFSNGADLSGVTEEAPLKLSKAVHKAVLTIDEKGTEAAGAMFLEAIPMSIPPEVKFNKPFVFLMIEQNTKSPLFMGKVVNPTQK

SEQ ID NO: 701 - DNA, 3220 bp, Homo sapiens
  source 1..3220: mol_type = genomic DNA
acaatgactcctttcggtaagtgcagtggaagctgtacactgcccaggcaaagcgtccgggcagcgtaggcgggcgactcagatcccagccagtggacttagcccctgtttgctcctccgataactggggtgaccttggttaatattcaccagcagcctcccccgttgcccctctggatccactgcttaaatacggacgaggacagggccctgtctcctcagcttcaggcaccaccactgacctgggacagtgaatcgacaatgccgtcttctgtctcgtggggcatcctcctgctggcaggcctgtgctgcctggtccctgtctccctggctgaggatccccagggagatgctgcccagaagacagatacatcccaccatgatcaggatcacccaaccttcaacaagatcacccccaacctggctgagttcgccttcagcctataccgccagctggcacaccagtccaacagcaccaatatcttcttctccccagtgagcatcgctacagcctttgcaatgctctccctggggaccaaggctgacactcacgatgaaatcctggagggcctgaatttcaacctcacggagattccggaggctcagatccatgaaggcttccaggaactcctccgtaccctcaaccagccagacagccagctccagctgaccaccggcaatggcctgttcctcagcgagggcctgaagctagtggataagtttttggaggatgttaaaaagttgtaccactcagaagccttcactgtcaacttcggggacaccgaagaggccaagaaacagatcaacgattacgtggagaagggtactcaagggaaaattgtggatttggtcaaggagcttgacagagacacagtttttgctctggtgaattacatcttctttaaaggcaaatgggagagaccctttgaagtcaaggacaccgaggaagaggacttccacgtggaccaggtgaccaccgtgaaggtgcctatgatgaagcgtttaggcatgtttaacatccagcactgtaagaagctgtccagctgggtgctgctgatgaaatacctgggcaatgccaccgccatcttcttcctgcctgatgaggggaaactacagcacctggaaaatgaactcacccacgatatcatcaccaagttcctggaaaatgaagacagaaggtctgccagcttacatttacccaaactgtccattactggaacctatgatctgaagagcgtcctgggtcaactgggcatcactaaggtcttcagcaatggggctgacctctccggggtcacagaggaggcacccctgaagctctccaaggccgtgcataaggctgtgctgaccatcgacgagaaagggactgaagctgctggggccatgtttttagaggccatacccatgtctatcccccccgaggtcaagttcaacaaaccctttgtcttcttaatgattgaacaaaataccaagtctcccctcttcatgggaaaagtggtgaatcccacccaaaaataactgcctctcgctcctcaacccctcccctccatccctggccccctccctggatgacattaaagaagggttgagctggtccctgcctgcatgtgactgtaaatccctcccatgttttctctgagtctccctttgcctgctgaggctgtatgtgggctccaggtaacagtgctgtcttcgggccccctgaactgtgttcatggagcatctggctgggtaggcacatgctgggcttgaatccaggggggactgaatcctcagcttacggacctgggcccatctgtttctggagggctccagtcttccttgtcctgtcttggagtccccaagaaggaatcacaggggaggaaccagataccagccatgaccccaggctccaccaagcatcttcatgtccccctgctcatcccccactcccccccacccagagttgctcatcctgccagggctggctgtgcccaccccaaggctgccctcctgggggccccagaactgcctgatcgtgccgtggcccagttttgtggcatctgcagcaacacaagagagaggacaatgtcctcctcttgacccgctgtcacctaaccagactcgggccctgcacctctcaggcacttctggaaaatgactgaggcagattcttcctgaagcccattctccatggggcaacaaggacacctattctgtccttgtccttccatcgctgccccagaaagcctcacatatctccgtttagaatcaggtcccttctccccagatgaagaggagggtctctgctttgttttctctatctcctcctcagacttgaccaggcccagcaggccccagaagaccattaccctatatcccttctcctccctagtcacatggccataggcctgctgatggctcaggaaggccattgcaaggactcctcagctatgggagaggaagcacatcacccattgacccccgcaacccctccctttcctcctctgagtcccgactggggccacatgcagcctgacttctttgtgcctgttgctgtccctgcagtcttcagagggccaccgcagctccagtgccacggcaggaggctgttcctgaatagcccctgtggtaagggccaggagagtccttccatcctccaaggccctgctaaaggacacagcagccaggaagtcccctgggcccctagctgaaggacagcctgctccctccgtctctaccaggaatggccttgtcctatggaaggcactgccccatcccaaactaatctaggaatcactgtctaaccactcactgtcatgaatgtgtacttaaaggatgaggttgagtcataccaaatagtgatttcgatagttcaaaatggtgaaattagcaattctacatgattcagtctaatcaatggataccgactgtttcccacacaagtctcctgttctcttaagcttactcactgacagcctttcactctccacaaatacattaaagatatggccatcaccaagccccctaggatgacaccagacctgagagtctgaagacctggatccaagttctgacttttccccctgacagctgtgtgaccttcgtgaagtcgccaaacctctctgagccccagtcattgctagtaagacctgcctttgagttggtatgatgttcaagttagataacaaaatgtttatacccattagaacagagaataaatagaactacatttcttgca

SEQ ID NO: 702 - protein, 394 aa, Homo sapiens
EDPQGDAAQKTDTSHHDQDHPTFNKITPNLAEFAFSLYRQLAHQSNSTNIFFSPVSIATAFAMLSLGTKADTHDEILEGLNFNLTEIPEAQIHEGFQELLRTLNQPDSQLQLTTGNGLFLSEGLKLVDKFLEDVKKLYHSEAFTVNFGDTEEAKKQINDYVEKGTQGKIVDLVKELDRDTVFALVNYIFFKGKWERPFEVKDTEEEDFHVDQVTTVKVPMMKRLGMFNIQHCKKLSSWVLLMKYLGNATAIFFLPDEGKLQHLENELTHDIITKFLENEDRRSASLHLPKLSITGTYDLKSVLGQLGITKVFSNGADLSGVTEEAPLKLSKAVHKAVLTIDEKGTEAAGAMFLEAIPMSIPPEVKFNKPFVFLMIEQNTKSPLFMGKVVNPTQK

SEQ ID NO: 703 - DNA, 3179 bp, Homo sapiens
  source 1..3179: mol_type = genomic DNA
agagtcctgagctgaaccaagaaggaggagggggtcgggcctccgaggaaggcctagccgctgctgctgccaggaattccaggttggaggggcggcaacctcctgccagccttcaggccactctcctgtgcctgccagaagagacagagcttgaggagagcttgaggagagcaggaaaggtgggacattgctgctgctgctcactcagttccacaggacaatgccgtcttctgtctcgtggggcatcctcctgctggcaggcctgtgctgcctggtccctgtctccctggctgaggatccccagggagatgctgcccagaagacagatacatcccaccatgatcaggatcacccaaccttcaacaagatcacccccaacctggctgagttcgccttcagcctataccgccagctggcacaccagtccaacagcaccaatatcttcttctccccagtgagcatcgctacagcctttgcaatgctctccctggggaccaaggctgacactcacgatgaaatcctggagggcctgaatttcaacctcacggagattccggaggctcagatccatgaaggcttccaggaactcctccgtaccctcaaccagccagacagccagctccagctgaccaccggcaatggcctgttcctcagcgagggcctgaagctagtggataagtttttggaggatgttaaaaagttgtaccactcagaagccttcactgtcaacttcggggacaccgaagaggccaagaaacagatcaacgattacgtggagaagggtactcaagggaaaattgtggatttggtcaaggagcttgacagagacacagtttttgctctggtgaattacatcttctttaaaggcaaatgggagagaccctttgaagtcaaggacaccgaggaagaggacttccacgtggaccaggtgaccaccgtgaaggtgcctatgatgaagcgtttaggcatgtttaacatccagcactgtaagaagctgtccagctgggtgctgctgatgaaatacctgggcaatgccaccgccatcttcttcctgcctgatgaggggaaactacagcacctggaaaatgaactcacccacgatatcatcaccaagttcctggaaaatgaagacagaaggtctgccagcttacatttacccaaactgtccattactggaacctatgatctgaagagcgtcctgggtcaactgggcatcactaaggtcttcagcaatggggctgacctctccggggtcacagaggaggcacccctgaagctctccaaggccgtgcataaggctgtgctgaccatcgacgagaaagggactgaagctgctggggccatgtttttagaggccatacccatgtctatcccccccgaggtcaagttcaacaaaccctttgtcttcttaatgattgaacaaaataccaagtctcccctcttcatgggaaaagtggtgaatcccacccaaaaataactgcctctcgctcctcaacccctcccctccatccctggccccctccctggatgacattaaagaagggttgagctggtccctgcctgcatgtgactgtaaatccctcccatgttttctctgagtctccctttgcctgctgaggctgtatgtgggctccaggtaacagtgctgtcttcgggccccctgaactgtgttcatggagcatctggctgggtaggcacatgctgggcttgaatccaggggggactgaatcctcagcttacggacctgggcccatctgtttctggagggctccagtcttccttgtcctgtcttggagtccccaagaaggaatcacaggggaggaaccagataccagccatgaccccaggctccaccaagcatcttcatgtccccctgctcatcccccactcccccccacccagagttgctcatcctgccagggctggctgtgcccaccccaaggctgccctcctgggggccccagaactgcctgatcgtgccgtggcccagttttgtggcatctgcagcaacacaagagagaggacaatgtcctcctcttgacccgctgtcacctaaccagactcgggccctgcacctctcaggcacttctggaaaatgactgaggcagattcttcctgaagcccattctccatggggcaacaaggacacctattctgtccttgtccttccatcgctgccccagaaagcctcacatatctccgtttagaatcaggtcccttctccccagatgaagaggagggtctctgctttgttttctctatctcctcctcagacttgaccaggcccagcaggccccagaagaccattaccctatatcccttctcctccctagtcacatggccataggcctgctgatggctcaggaaggccattgcaaggactcctcagctatgggagaggaagcacatcacccattgacccccgcaacccctccctttcctcctctgagtcccgactggggccacatgcagcctgacttctttgtgcctgttgctgtccctgcagtcttcagagggccaccgcagctccagtgccacggcaggaggctgttcctgaatagcccctgtggtaagggccaggagagtccttccatcctccaaggccctgctaaaggacacagcagccaggaagtcccctgggcccctagctgaaggacagcctgctccctccgtctctaccaggaatggccttgtcctatggaaggcactgccccatcccaaactaatctaggaatcactgtctaaccactcactgtcatgaatgtgtacttaaaggatgaggttgagtcataccaaatagtgatttcgatagttcaaaatggtgaaattagcaattctacatgattcagtctaatcaatggataccgactgtttcccacacaagtctcctgttctcttaagcttactcactgacagcctttcactctccacaaatacattaaagatatggccatcaccaagccccctaggatgacaccagacctgagagtctgaagacctggatccaagttctgacttttccccctgacagctgtgtgaccttcgtgaagtcgccaaacctctctgagccccagtcattgctagtaagacctgcctttgagttggtatgatgttcaagttagataacaaaatgtttatacccattagaacagagaataaatagaactacatttcttgca

SEQ ID NO: 704 - skipped

SEQ ID NO: 705 - protein, 24 aa, Homo sapiens
MPSSVSWGILLLAGLCCLVPVSLA

SEQ ID NO: 706-709 - skipped (4 entries)

SEQ ID NO: 710 - DNA, 5866 bp, synthetic construct
  source 1..5866: mol_type = other DNA
aagtggtggcctaactacggctacactagaagaacagtatttggtatctgcgctctgctgaagccagttaccttcggaaaaagagttggtagctcttgatccggcaaacaaaccaccgctggtagcggtggtttttttgtttgcaagcagcagattacgcgcagaaaaaaaggatctcaagaagatcctttgatcttttctacggggtctgacgctcagtggaacgaaaactcacgttaagggattttggtcatgagattatcaaaaaggatcttcacctagatccttttaaattaaaaatgaagttttaaatcaagcccaatctgaataatgttacaaccaattaaccaattctgattagaaaaactcatcgagcatcaaatgaaactgcaatttattcatatcaggattatcaataccatatttttgaaaaagccgtttctgtaatgaaggagaaaactcaccgaggcagttccataggatggcaagatcctggtatcggtctgcgattccgactcgtccaacatcaatacaacctattaatttcccctcgtcaaaaataaggttatcaagtgagaaatcaccatgagtgacgactgaatccggtgagaatggcaaaagtttatgcatttctttccagacttgttcaacaggccagccattacgctcgtcatcaaaatcactcgcatcaaccaaaccgttattcattcgtgattgcgcctgagcgagacgaaatacgcgatcgctgttaaaaggacaattacaaacaggaatcgaatgcaaccggcgcaggaacactgccagcgcatcaacaatattttcacctgaatcaggatattcttctaatacctggaatgctgtttttccggggatcgcagtggtgagtaaccatgcatcatcaggagtacggataaaatgcttgatggtcggaagaggcataaattccgtcagccagtttagtctgaccatctcatctgtaacatcattggcaacgctacctttgccatgtttcagaaacaactctggcgcatcgggcttcccatacaagcgatagattgtcgcacctgattgcccgacattatcgcgagcccatttatacccatataaatcagcatccatgttggaatttaatcgcggcctcgacgtttcccgttgaatatggctcataacaccccttgtattactgtttatgtaagcagacagttttattgttcatgatgatatatttttatcttgtgcaatgtaacatcagagattttgagacacgggccagagctgcatcgcgcgtttcggtgatgacggtgaaaacctctgacacatgcagctcccggagacggtcacagcttgtctgtaagcggatgccgggagcagacaagcccgtcagggcgcgtcagcgggtgttggcgggtgtcggggctggcttaactatgcggcatcagagcagattgtactgagagtgcaccatatgcggtgtgaaataccgcacagatgcgtaaggagaaaataccgcatcaggcgccattcgccattcaggctgcgcaactgttgggaagggcgatcggtgcgggcctcttcgctattacgccagctggcgaaagggggatgtgctgcaaggcgattaagttgggtaacgccagggttttcccagtcacgacgttgtaaaacgacggccagagaattcttggccactccctctctgcgcgctcgctcgctcactgaggccgggcgaccaaaggtcgcccgacgcccgggctttgcccgggcggcctcagtgagcgagcgagcgcgcagagagggagtggccaactccatcactaggggttcctagatctactagttaggtcagtgaagagaagaacaaaaagcagcatattacagttagttgtcttcatcaatctttaaatatgttgtgtggtttttctctccctgtttccacagttgaggacccccagggcgacgccgcccagaagaccgacaccagccaccacgaccaggaccaccccaccttcaacaagatcacccccaacctggccgagttcgccttcagcctgtacaggcagctggcccaccagagcaacagcaccaacatcttcttcagccccgtgagcatcgccaccgccttcgccatgctgagcctgggcaccaaggccgacacccacgacgagatcctggagggcctgaacttcaacctgaccgagatccccgaggcccagatccacgagggcttccaggagctgctgaggaccctgaaccagcccgacagccagctgcagctgaccaccggcaacggcctgttcctgagcgagggcctgaagctggtggacaagttcctggaggacgtgaagaagctgtaccacagcgaggccttcaccgtgaacttcggcgacaccgaggaggccaagaagcagatcaacgactacgtggagaagggcacccagggcaagatcgtggacctggtgaaggagctggacagggacaccgtgttcgccctggtgaactacatcttcttcaagggcaagtgggagaggcccttcgaggtgaaggacaccgaggaggaggacttccacgtggaccaggtgaccaccgtgaaggtgcccatgatgaagaggctgggcatgttcaacatccagcactgcaagaagctgagcagctgggtgctgctgatgaagtacctgggcaacgccaccgccatcttcttcctgcccgacgagggcaagctgcagcacctggagaacgagctgacccacgacatcatcaccaagttcctggagaacgaggacaggaggagcgccagcctgcacctgcccaagctgagcatcaccggcacctacgacctgaagagcgtgctgggccagctgggcatcaccaaggtgttcagcaacggcgccgacctgagcggcgtgaccgaggaggcccccctgaagctgagcaaggccgtgcacaaggccgtgctgaccatcgacgagaagggcaccgaggccgccggcgccatgttcctggaggccatccccatgagcatcccccccgaggtgaagttcaacaagcccttcgtgttcctgatgatcgagcagaacaccaagagccccctgttcatgggcaaggtggtgaaccccacccagaagtaacagacatgataagatacattgatgagtttggacaaaccacaactagaatgcagtgaaaaaaatgctttatttgtgaaatttgtgatgctattgctttatttgtaaccattataagctgcaataaacaagttaacaacaacaattgcattcattttatgtttcaggttcagggggaggtgtgggaggttttttggggataccccctagagccccagctggttctttccgcctcagaagccatagagcccaccgcatccccagcatgcctgctattgtcttcccaatcctcccccttgctgtcctgccccaccccaccccccagaatagaatgacacctactcagacaatgcgatgcaatttcctcattttattaggaaaggacagtgggagtggcaccttccagggtcaaggaaggcacgggggaggggcaaacaacagatggctggcaactagaaggcacagtcgaggttatttttgggtgggattcaccacttttcccatgaagaggggagacttggtattttgttcaatcattaagaagacaaagggtttgttgaacttgacctcgggggggatagacatgggtatggcctctaaaaacatggccccagcagcttcagtccctttctcgtcgatggtcagcacagccttatgcacggccttggagagcttcaggggtgcctcctctgtgaccccggagaggtcagccccattgctgaagaccttagtgatgcccagttgacccaggacgctcttcagatcataggttccagtaatggacagtttgggtaaatgtaagctggcagaccttctgtcttcattttccaggaacttggtgatgatatcgtgggtgagttcattttccaggtgctgtagtttcccctcatcaggcaggaagaagatggcggtggcattgcccaggtatttcatcagcagcacccagctggacagcttcttacagtgctggatgttaaacatgcctaaacgcttcatcataggcaccttcacggtggtcacctggtccacgtggaagtcctcttcctcggtgtccttgacttcaaagggtctctcccatttgcctttaaagaagatgtaattcaccagagcaaaaactgtgtctctgtcaagctccttgaccaaatccacaattttcccttgagtacccttctccacgtaatcgttgatctgtttcttggcctcttcggtgtccccgaagttgacagtgaaggcttctgagtggtacaactttttaacatcctccaaaaacttatccactagcttcaggccctcgctgaggaacaggccattgccggtggtcagctggagctggctgtctggctggttgagggtacggaggagttcctggaagccttcatggatctgagcctccggaatctccgtgaggttgaaattcaggccctccaggatttcatcgtgagtgtcagccttggtccccagggagagcattgcaaaggctgtagcgatgctcactggggagaagaagatattggtgctgttggactggtgtgccagctggcggtataggctgaaggcgaactcagccaggttgggggtgatcttgttgaaggttgggtgatcctgatcatggtgggatgtatctgtcttctgggcagcatctccctggggatcctcaactgtggaaacagggagagaaaaaccacacaacatatttaaagattgatgaagacaactaactgtaatatgctgctttttgttcttctcttcactgacctaactagtagatctaggaacccctagtgatggagttggccactccctctctgcgcgctcgctcgctcactgaggccgcccgggcaaagcccgggcgtcgggcgacctttggtcgcccggcctcagtgagcgagcgagcgcgcagagagggagtggccaaacgcgtggtgtaatcatggtcatagctgtttcctgtgtgaaattgttatccgctcacaattccacacaacatacgagccggaagcataaagtgtaaagcctggggtgcctaatgagtgagctaactcacattaattgcgttgcgctcactgcccgctttccagtcgggaaacctgtcgtgccagctgcattaatgaatcggccaacgcgcggggagaggcggtttgcgtattgggcgctcttccgcttcctcgctcactgactcgctgcgctcggtcgttcggctgcggcgagcggtatcagctcactcaaaggcggtaatacggttatccacagaatcaggggataacgcaggaaagaacatgtgagcaaaaggccagcaaaaggccaggaaccgtaaaaaggccgcgttgctggcgtttttccataggctccgcccccctgacgagcatcacaaaaatcgacgctcaagtcagaggtggcgaaacccgacaggactataaagataccaggcgtttccccctggaagctccctcgtgcgctctcctgttccgaccctgccgcttaccggatacctgtccgcctttctcccttcgggaagcgtggcgctttctcatagctcacgctgtaggtatctcagttcggtgtaggtcgttcgctccaagctgggctgtgtgcacgaaccccccgttcagcccgaccgctgcgccttatccggtaactatcgtcttgagtccaacccggtaagacacgacttatcgccactggcagcagccactggtaacaggattagcagagcgaggtatgtaggcggtgctacagagttcttg

SEQ ID NO: 711 - DNA, 1185 bp, synthetic construct
  source 1..1185: mol_type = other DNA
gaggacccccagggcgacgccgcccagaagaccgacaccagccaccacgaccaggaccaccccaccttcaacaagatcacccccaacctggccgagttcgccttcagcctgtacaggcagctggcccaccagagcaacagcaccaacatcttcttcagccccgtgagcatcgccaccgccttcgccatgctgagcctgggcaccaaggccgacacccacgacgagatcctggagggcctgaacttcaacctgaccgagatccccgaggcccagatccacgagggcttccaggagctgctgaggaccctgaaccagcccgacagccagctgcagctgaccaccggcaacggcctgttcctgagcgagggcctgaagctggtggacaagttcctggaggacgtgaagaagctgtaccacagcgaggccttcaccgtgaacttcggcgacaccgaggaggccaagaagcagatcaacgactacgtggagaagggcacccagggcaagatcgtggacctggtgaaggagctggacagggacaccgtgttcgccctggtgaactacatcttcttcaagggcaagtgggagaggcccttcgaggtgaaggacaccgaggaggaggacttccacgtggaccaggtgaccaccgtgaaggtgcccatgatgaagaggctgggcatgttcaacatccagcactgcaagaagctgagcagctgggtgctgctgatgaagtacctgggcaacgccaccgccatcttcttcctgcccgacgagggcaagctgcagcacctggagaacgagctgacccacgacatcatcaccaagttcctggagaacgaggacaggaggagcgccagcctgcacctgcccaagctgagcatcaccggcacctacgacctgaagagcgtgctgggccagctgggcatcaccaaggtgttcagcaacggcgccgacctgagcggcgtgaccgaggaggcccccctgaagctgagcaaggccgtgcacaaggccgtgctgaccatcgacgagaagggcaccgaggccgccggcgccatgttcctggaggccatccccatgagcatcccccccgaggtgaagttcaacaagcccttcgtgttcctgatgatcgagcagaacaccaagagccccctgttcatgggcaaggtggtgaaccccacccagaagtaa

SEQ ID NO: 712 - DNA, 1185 bp, synthetic construct
  source 1..1185: mol_type = other DNA
gaggatccccagggagatgctgcccagaagacagatacatcccaccatgatcaggatcacccaaccttcaacaagatcacccccaacctggctgagttcgccttcagcctataccgccagctggcacaccagtccaacagcaccaatatcttcttctccccagtgagcatcgctacagcctttgcaatgctctccctggggaccaaggctgacactcacgatgaaatcctggagggcctgaatttcaacctcacggagattccggaggctcagatccatgaaggcttccaggaactcctccgtaccctcaaccagccagacagccagctccagctgaccaccggcaatggcctgttcctcagcgagggcctgaagctagtggataagtttttggaggatgttaaaaagttgtaccactcagaagccttcactgtcaacttcggggacaccgaagaggccaagaaacagatcaacgattacgtggagaagggtactcaagggaaaattgtggatttggtcaaggagcttgacagagacacagtttttgctctggtgaattacatcttctttaaaggcaaatgggagagaccctttgaagtcaaggacaccgaggaagaggacttccacgtggaccaggtgaccaccgtgaaggtgcctatgatgaagcgtttaggcatgtttaacatccagcactgtaagaagctgtccagctgggtgctgctgatgaaatacctgggcaatgccaccgccatcttcttcctgcctgatgaggggaaactacagcacctggaaaatgaactcacccacgatatcatcaccaagttcctggaaaatgaagacagaaggtctgccagcttacatttacccaaactgtccattactggaacctatgatctgaagagcgtcctgggtcaactgggcatcactaaggtcttcagcaatggggctgacctctccggggtcacagaggaggcacccctgaagctctccaaggccgtgcataaggctgtgctgaccatcgacgagaaagggactgaagctgctggggccatgtttttagaggccatacccatgtctatcccccccgaggtcaagttcaacaaaccctttgtcttcttaatgattgaacaaaataccaagtctcccctcttcatgggaaaagtggtgaatcccacccaaaaataa

SEQ ID NO: 713-719 - skipped (7 entries)

SEQ ID NO: 720 - DNA, 5866 bp, synthetic construct
  source 1..5866: mol_type = other DNA
ttggccactccctctctgcgcgctcgctcgctcactgaggccgggcgaccaaaggtcgcccgacgcccgggctttgcccgggcggcctcagtgagcgagcgagcgcgcagagagggagtggccaactccatcactaggggttcctagatctactagttaggtcagtgaagagaagaacaaaaagcagcatattacagttagttgtcttcatcaatctttaaatatgttgtgtggtttttctctccctgtttccacagttgaggacccccagggcgacgccgcccagaagaccgacaccagccaccacgaccaggaccaccccaccttcaacaagatcacccccaacctggccgagttcgccttcagcctgtacaggcagctggcccaccagagcaacagcaccaacatcttcttcagccccgtgagcatcgccaccgccttcgccatgctgagcctgggcaccaaggccgacacccacgacgagatcctggagggcctgaacttcaacctgaccgagatccccgaggcccagatccacgagggcttccaggagctgctgaggaccctgaaccagcccgacagccagctgcagctgaccaccggcaacggcctgttcctgagcgagggcctgaagctggtggacaagttcctggaggacgtgaagaagctgtaccacagcgaggccttcaccgtgaacttcggcgacaccgaggaggccaagaagcagatcaacgactacgtggagaagggcacccagggcaagatcgtggacctggtgaaggagctggacagggacaccgtgttcgccctggtgaactacatcttcttcaagggcaagtgggagaggcccttcgaggtgaaggacaccgaggaggaggacttccacgtggaccaggtgaccaccgtgaaggtgcccatgatgaagaggctgggcatgttcaacatccagcactgcaagaagctgagcagctgggtgctgctgatgaagtacctgggcaacgccaccgccatcttcttcctgcccgacgagggcaagctgcagcacctggagaacgagctgacccacgacatcatcaccaagttcctggagaacgaggacaggaggagcgccagcctgcacctgcccaagctgagcatcaccggcacctacgacctgaagagcgtgctgggccagctgggcatcaccaaggtgttcagcaacggcgccgacctgagcggcgtgaccgaggaggcccccctgaagctgagcaaggccgtgcacaaggccgtgctgaccatcgacgagaagggcaccgaggccgccggcgccatgttcctggaggccatccccatgagcatcccccccgaggtgaagttcaacaagcctttcgtgttcctgatgatcgagcagaacaccaagagccccctgttcatgggcaaggtggtgaaccccacccagaagtaacagacatgataagatacattgatgagtttggacaaaccacaactagaatgcagtgaaaaaaatgctttatttgtgaaatttgtgatgctattgctttatttgtaaccattataagctgcaataaacaagttaacaacaacaattgcattcattttatgtttcaggttcagggggaggtgtgggaggttttttggggataccccctagagccccagctggttctttccgcctcagaagccatagagcccaccgcatccccagcatgcctgctattgtcttcccaatcctcccccttgctgtcctgccccaccccaccccccagaatagaatgacacctactcagacaatgcgatgcaatttcctcattttattaggaaaggacagtgggagtggcaccttccagggtcaaggaaggcacgggggaggggcaaacaacagatggctggcaactagaaggcacagtcgaggttatttttgggtgggattcaccacttttcccatgaagaggggtgatttagtgttctgctcgatcatgagaaatacaaaaggtttgttgaacttgacctcgggggggatagacatgggtatggcctctaaaaacatggccccagcagcctcggtgcccttctcgtcgatggtcagcacagccttatgcacggccttggagagcttcaggggtgcctcctctgtgaccccggagaggtcagccccattgctgaagaccttagtgatgcccagttgacccaggacgctcttcagatcataggttccagtaatggacagtttgggtaaatgtaagctggcagaccttctgtcttcattttccaggaacttggtgatgatatcgtgggtgagttcattttccaggtgctgtagtttcccctcatcaggcaggaagaagatggcggtggcattgcccaggtatttcatcagcagcacccagctggacagcttcttacagtgctggatattgaacataccaagccttttcatcataggcaccttcacggtggtcacctggtccacgtggaagtcctcttcctcggtgtccttgacttcaaagggtctctcccatttgcctttaaagaagatgtaattcaccagagcaaaaactgtgtctctgtcaagctccttgaccaaatccacaattttcccttgagtacccttctccacgtaatcgttgatctgtttcttggcctcttcggtgtccccgaagttgacagtgaaggcttctgagtggtacaactttttaacatcctccaaaaacttatccactagcttcaggccctcgctgaggaacaggccattgccggtggtcagctggagctggctgtctggctggttgagggtacggaggagttcctggaagccttcatggatctgagcctccggaatctccgtgaggttgaaattcaggccctccaggatttcatcgtgagtgtcagccttggtccccagggagagcattgcaaaggctgtagcgatgctcactggggagaagaagatattggtgctgttggactggtgtgccagctggcggtataggctgaaggcgaactcagccaggttgggggtgatcttgttgaaggttgggtgatcctgatcatggtgggatgtatctgtcttctgggcagcatctccctggggatcctcaactgtggaaacagggagagaaaaaccacacaacatatttaaagattgatgaagacaactaactgtaatatgctgctttttgttcttctcttcactgacctaactagtagatctaggaacccctagtgatggagttggccactccctctctgcgcgctcgctcgctcactgaggccgcccgggcaaagcccgggcgtcgggcgacctttggtcgcccggcctcagtgagcgagcgagcgcgcagagagggagtggccaaacgcgtggtgtaatcatggtcatagctgtttcctgtgtgaaattgttatccgctcacaattccacacaacatacgagccggaagcataaagtgtaaagcctggggtgcctaatgagtgagctaactcacattaattgcgttgcgctcactgcccgctttccagtcgggaaacctgtcgtgccagctgcattaatgaatcggccaacgcgcggggagaggcggtttgcgtattgggcgctcttccgcttcctcgctcactgactcgctgcgctcggtcgttcggctgcggcgagcggtatcagctcactcaaaggcggtaatacggttatccacagaatcaggggataacgcaggaaagaacatgtgagcaaaaggccagcaaaaggccaggaaccgtaaaaaggccgcgttgctggcgtttttccataggctccgcccccctgacgagcatcacaaaaatcgacgctcaagtcagaggtggcgaaacccgacaggactataaagataccaggcgtttccccctggaagctccctcgtgcgctctcctgttccgaccctgccgcttaccggatacctgtccgcctttctcccttcgggaagcgtggcgctttctcatagctcacgctgtaggtatctcagttcggtgtaggtcgttcgctccaagctgggctgtgtgcacgaaccccccgttcagcccgaccgctgcgccttatccggtaactatcgtcttgagtccaacccggtaagacacgacttatcgccactggcagcagccactggtaacaggattagcagagcgaggtatgtaggcggtgctacagagttcttgaagtggtggcctaactacggctacactagaagaacagtatttggtatctgcgctctgctgaagccagttaccttcggaaaaagagttggtagctcttgatccggcaaacaaaccaccgctggtagcggtggtttttttgtttgcaagcagcagattacgcgcagaaaaaaaggatctcaagaagatcctttgatcttttctacggggtctgacgctcagtggaacgaaaactcacgttaagggattttggtcatgagattatcaaaaaggatcttcacctagatccttttaaattaaaaatgaagttttaaatcaagcccaatctgaataatgttacaaccaattaaccaattctgattagaaaaactcatcgagcatcaaatgaaactgcaatttattcatatcaggattatcaataccatatttttgaaaaagccgtttctgtaatgaaggagaaaactcaccgaggcagttccataggatggcaagatcctggtatcggtctgcgattccgactcgtccaacatcaatacaacctattaatttcccctcgtcaaaaataaggttatcaagtgagaaatcaccatgagtgacgactgaatccggtgagaatggcaaaagtttatgcatttctttccagacttgttcaacaggccagccattacgctcgtcatcaaaatcactcgcatcaaccaaaccgttattcattcgtgattgcgcctgagcgagacgaaatacgcgatcgctgttaaaaggacaattacaaacaggaatcgaatgcaaccggcgcaggaacactgccagcgcatcaacaatattttcacctgaatcaggatattcttctaatacctggaatgctgtttttccggggatcgcagtggtgagtaaccatgcatcatcaggagtacggataaaatgcttgatggtcggaagaggcataaattccgtcagccagtttagtctgaccatctcatctgtaacatcattggcaacgctacctttgccatgtttcagaaacaactctggcgcatcgggcttcccatacaagcgatagattgtcgcacctgattgcccgacattatcgcgagcccatttatacccatataaatcagcatccatgttggaatttaatcgcggcctcgacgtttcccgttgaatatggctcataacaccccttgtattactgtttatgtaagcagacagttttattgttcatgatgatatatttttatcttgtgcaatgtaacatcagagattttgagacacgggccagagctgcatcgcgcgtttcggtgatgacggtgaaaacctctgacacatgcagctcccggagacggtcacagcttgtctgtaagcggatgccgggagcagacaagcccgtcagggcgcgtcagcgggtgttggcgggtgtcggggctggcttaactatgcggcatcagagcagattgtactgagagtgcaccatatgcggtgtgaaataccgcacagatgcgtaaggagaaaataccgcatcaggcgccattcgccattcaggctgcgcaactgttgggaagggcgatcggtgcgggcctcttcgctattacgccagctggcgaaagggggatgtgctgcaaggcgattaagttgggtaacgccagggttttcccagtcacgacgttgtaaaacgacggccagagaattc

SEQ ID NO: 721 - DNA, 1185 bp, synthetic construct
  source 1..1185: mol_type = other DNA
gaggacccccagggcgacgccgcccagaagaccgacaccagccaccacgaccaggaccaccccaccttcaacaagatcacccccaacctggccgagttcgccttcagcctgtacaggcagctggcccaccagagcaacagcaccaacatcttcttcagccccgtgagcatcgccaccgccttcgccatgctgagcctgggcaccaaggccgacacccacgacgagatcctggagggcctgaacttcaacctgaccgagatccccgaggcccagatccacgagggcttccaggagctgctgaggaccctgaaccagcccgacagccagctgcagctgaccaccggcaacggcctgttcctgagcgagggcctgaagctggtggacaagttcctggaggacgtgaagaagctgtaccacagcgaggccttcaccgtgaacttcggcgacaccgaggaggccaagaagcagatcaacgactacgtggagaagggcacccagggcaagatcgtggacctggtgaaggagctggacagggacaccgtgttcgccctggtgaactacatcttcttcaagggcaagtgggagaggcccttcgaggtgaaggacaccgaggaggaggacttccacgtggaccaggtgaccaccgtgaaggtgcccatgatgaagaggctgggcatgttcaacatccagcactgcaagaagctgagcagctgggtgctgctgatgaagtacctgggcaacgccaccgccatcttcttcctgcccgacgagggcaagctgcagcacctggagaacgagctgacccacgacatcatcaccaagttcctggagaacgaggacaggaggagcgccagcctgcacctgcccaagctgagcatcaccggcacctacgacctgaagagcgtgctgggccagctgggcatcaccaaggtgttcagcaacggcgccgacctgagcggcgtgaccgaggaggcccccctgaagctgagcaaggccgtgcacaaggccgtgctgaccatcgacgagaagggcaccgaggccgccggcgccatgttcctggaggccatccccatgagcatcccccccgaggtgaagttcaacaagcctttcgtgttcctgatgatcgagcagaacaccaagagccccctgttcatgggcaaggtggtgaaccccacccagaagtaa

SEQ ID NO: 722 - DNA, 1185 bp, synthetic construct
  source 1..1185: mol_type = other DNA
gaggatccccagggagatgctgcccagaagacagatacatcccaccatgatcaggatcacccaaccttcaacaagatcacccccaacctggctgagttcgccttcagcctataccgccagctggcacaccagtccaacagcaccaatatcttcttctccccagtgagcatcgctacagcctttgcaatgctctccctggggaccaaggctgacactcacgatgaaatcctggagggcctgaatttcaacctcacggagattccggaggctcagatccatgaaggcttccaggaactcctccgtaccctcaaccagccagacagccagctccagctgaccaccggcaatggcctgttcctcagcgagggcctgaagctagtggataagtttttggaggatgttaaaaagttgtaccactcagaagccttcactgtcaacttcggggacaccgaagaggccaagaaacagatcaacgattacgtggagaagggtactcaagggaaaattgtggatttggtcaaggagcttgacagagacacagtttttgctctggtgaattacatcttctttaaaggcaaatgggagagaccctttgaagtcaaggacaccgaggaagaggacttccacgtggaccaggtgaccaccgtgaaggtgcctatgatgaaaaggcttggtatgttcaatatccagcactgtaagaagctgtccagctgggtgctgctgatgaaatacctgggcaatgccaccgccatcttcttcctgcctgatgaggggaaactacagcacctggaaaatgaactcacccacgatatcatcaccaagttcctggaaaatgaagacagaaggtctgccagcttacatttacccaaactgtccattactggaacctatgatctgaagagcgtcctgggtcaactgggcatcactaaggtcttcagcaatggggctgacctctccggggtcacagaggaggcacccctgaagctctccaaggccgtgcataaggctgtgctgaccatcgacgagaagggcaccgaggctgctggggccatgtttttagaggccatacccatgtctatcccccccgaggtcaagttcaacaaaccttttgtatttctcatgatcgagcagaacactaaatcacccctcttcatgggaaaagtggtgaatcccacccaaaaataa

SEQ ID NO: 723-729 - skipped (7 entries)

SEQ ID NO: 730 - DNA, 5950 bp, synthetic construct
  source 1..5950: mol_type = other DNA
ttggccactccctctctgcgcgctcgctcgctcactgaggccgggcgaccaaaggtcgcccgacgcccgggctttgcccgggcggcctcagtgagcgagcgagcgcgcagagagggagtggccaactccatcactaggggttcctagatctactagtataacttcgtatagcatacattatacgaagttatatgtatgctaggtcagtgaagagaagaacaaaaagcagcatattacagttagttgtcttcatcaatctttaaatatgttgtgtggtttttctctccctgtttccacagttgaggacccccagggcgacgccgcccagaagaccgacaccagccaccacgaccaggaccaccccaccttcaacaagatcacccccaacctggccgagttcgccttcagcctgtacaggcagctggcccaccagagcaacagcaccaacatcttcttcagccccgtgagcatcgccaccgccttcgccatgctgagcctgggcaccaaggccgacacccacgacgagatcctggagggcctgaacttcaacctgaccgagatccccgaggcccagatccacgagggcttccaggagctgctgaggaccctgaaccagcccgacagccagctgcagctgaccaccggcaacggcctgttcctgagcgagggcctgaagctggtggacaagttcctggaggacgtgaagaagctgtaccacagcgaggccttcaccgtgaacttcggcgacaccgaggaggccaagaagcagatcaacgactacgtggagaagggcacccagggcaagatcgtggacctggtgaaggagctggacagggacaccgtgttcgccctggtgaactacatcttcttcaagggcaagtgggagaggcccttcgaggtgaaggacaccgaggaggaggacttccacgtggaccaggtgaccaccgtgaaggtgcccatgatgaagaggctgggcatgttcaacatccagcactgcaagaagctgagcagctgggtgctgctgatgaagtacctgggcaacgccaccgccatcttcttcctgcccgacgagggcaagctgcagcacctggagaacgagctgacccacgacatcatcaccaagttcctggagaacgaggacaggaggagcgccagcctgcacctgcccaagctgagcatcaccggcacctacgacctgaagagcgtgctgggccagctgggcatcaccaaggtgttcagcaacggcgccgacctgagcggcgtgaccgaggaggcccccctgaagctgagcaaggccgtgcacaaggccgtgctgaccatcgacgagaagggcaccgaggccgccggcgccatgttcctggaggccatccccatgagcatcccccccgaggtgaagttcaacaagcctttcgtgttcctgatgatcgagcagaacaccaagagccccctgttcatgggcaaggtggtgaaccccacccagaagtaacagacatgataagatacattgatgagtttggacaaaccacaactagaatgcagtgaaaaaaatgctttatttgtgaaatttgtgatgctattgctttatttgtaaccattataagctgcaataaacaagttaacaacaacaattgcattcattttatgtttcaggttcagggggaggtgtgggaggttttttggggataccccctagagccccagctggttctttccgcctcagaagccatagagcccaccgcatccccagcatgcctgctattgtcttcccaatcctcccccttgctgtcctgccccaccccaccccccagaatagaatgacacctactcagacaatgcgatgcaatttcctcattttattaggaaaggacagtgggagtggcaccttccagggtcaaggaaggcacgggggaggggcaaacaacagatggctggcaactagaaggcacagtcgaggttatttttgggtgggattcaccacttttcccatgaagaggggtgatttagtgttctgctcgatcatgagaaatacaaaaggtttgttgaacttgacctcgggggggatagacatgggtatggcctctaaaaacatggccccagcagcctcggtgcccttctcgtcgatggtcagcacagccttatgcacggccttggagagcttcaggggtgcctcctctgtgaccccggagaggtcagccccattgctgaagaccttagtgatgcccagttgacccaggacgctcttcagatcataggttccagtaatggacagtttgggtaaatgtaagctggcagaccttctgtcttcattttccaggaacttggtgatgatatcgtgggtgagttcattttccaggtgctgtagtttcccctcatcaggcaggaagaagatggcggtggcattgcccaggtatttcatcagcagcacccagctggacagcttcttacagtgctggatattgaacataccaagccttttcatcataggcaccttcacggtggtcacctggtccacgtggaagtcctcttcctcggtgtccttgacttcaaagggtctctcccatttgcctttaaagaagatgtaattcaccagagcaaaaactgtgtctctgtcaagctccttgaccaaatccacaattttcccttgagtacccttctccacgtaatcgttgatctgtttcttggcctcttcggtgtccccgaagttgacagtgaaggcttctgagtggtacaactttttaacatcctccaaaaacttatccactagcttcaggccctcgctgaggaacaggccattgccggtggtcagctggagctggctgtctggctggttgagggtacggaggagttcctggaagccttcatggatctgagcctccggaatctccgtgaggttgaaattcaggccctccaggatttcatcgtgagtgtcagccttggtccccagggagagcattgcaaaggctgtagcgatgctcactggggagaagaagatattggtgctgttggactggtgtgccagctggcggtataggctgaaggcgaactcagccaggttgggggtgatcttgttgaaggttgggtgatcctgatcatggtgggatgtatctgtcttctgggcagcatctccctggggatcctcaactgtggaaacagggagagaaaaaccacacaacatatttaaagattgatgaagacaactaactgtaatatgctgctttttgttcttctcttcactgacctaatgtatgcataacttcgtatagcatacattatacgaagttatactagtagatctaggaacccctagtgatggagttggccactccctctctgcgcgctcgctcgctcactgaggccgcccgggcaaagcccgggcgtcgggcgacctttggtcgcccggcctcagtgagcgagcgagcgcgcagagagggagtggccaaacgcgtggtgtaatcatggtcatagctgtttcctgtgtgaaattgttatccgctcacaattccacacaacatacgagccggaagcataaagtgtaaagcctggggtgcctaatgagtgagctaactcacattaattgcgttgcgctcactgcccgctttccagtcgggaaacctgtcgtgccagctgcattaatgaatcggccaacgcgcggggagaggcggtttgcgtattgggcgctcttccgcttcctcgctcactgactcgctgcgctcggtcgttcggctgcggcgagcggtatcagctcactcaaaggcggtaatacggttatccacagaatcaggggataacgcaggaaagaacatgtgagcaaaaggccagcaaaaggccaggaaccgtaaaaaggccgcgttgctggcgtttttccataggctccgcccccctgacgagcatcacaaaaatcgacgctcaagtcagaggtggcgaaacccgacaggactataaagataccaggcgtttccccctggaagctccctcgtgcgctctcctgttccgaccctgccgcttaccggatacctgtccgcctttctcccttcgggaagcgtggcgctttctcatagctcacgctgtaggtatctcagttcggtgtaggtcgttcgctccaagctgggctgtgtgcacgaaccccccgttcagcccgaccgctgcgccttatccggtaactatcgtcttgagtccaacccggtaagacacgacttatcgccactggcagcagccactggtaacaggattagcagagcgaggtatgtaggcggtgctacagagttcttgaagtggtggcctaactacggctacactagaagaacagtatttggtatctgcgctctgctgaagccagttaccttcggaaaaagagttggtagctcttgatccggcaaacaaaccaccgctggtagcggtggtttttttgtttgcaagcagcagattacgcgcagaaaaaaaggatctcaagaagatcctttgatcttttctacggggtctgacgctcagtggaacgaaaactcacgttaagggattttggtcatgagattatcaaaaaggatcttcacctagatccttttaaattaaaaatgaagttttaaatcaagcccaatctgaataatgttacaaccaattaaccaattctgattagaaaaactcatcgagcatcaaatgaaactgcaatttattcatatcaggattatcaataccatatttttgaaaaagccgtttctgtaatgaaggagaaaactcaccgaggcagttccataggatggcaagatcctggtatcggtctgcgattccgactcgtccaacatcaatacaacctattaatttcccctcgtcaaaaataaggttatcaagtgagaaatcaccatgagtgacgactgaatccggtgagaatggcaaaagtttatgcatttctttccagacttgttcaacaggccagccattacgctcgtcatcaaaatcactcgcatcaaccaaaccgttattcattcgtgattgcgcctgagcgagacgaaatacgcgatcgctgttaaaaggacaattacaaacaggaatcgaatgcaaccggcgcaggaacactgccagcgcatcaacaatattttcacctgaatcaggatattcttctaatacctggaatgctgtttttccggggatcgcagtggtgagtaaccatgcatcatcaggagtacggataaaatgcttgatggtcggaagaggcataaattccgtcagccagtttagtctgaccatctcatctgtaacatcattggcaacgctacctttgccatgtttcagaaacaactctggcgcatcgggcttcccatacaagcgatagattgtcgcacctgattgcccgacattatcgcgagcccatttatacccatataaatcagcatccatgttggaatttaatcgcggcctcgacgtttcccgttgaatatggctcataacaccccttgtattactgtttatgtaagcagacagttttattgttcatgatgatatatttttatcttgtgcaatgtaacatcagagattttgagacacgggccagagctgcatcgcgcgtttcggtgatgacggtgaaaacctctgacacatgcagctcccggagacggtcacagcttgtctgtaagcggatgccgggagcagacaagcccgtcagggcgcgtcagcgggtgttggcgggtgtcggggctggcttaactatgcggcatcagagcagattgtactgagagtgcaccatatgcggtgtgaaataccgcacagatgcgtaaggagaaaataccgcatcaggcgccattcgccattcaggctgcgcaactgttgggaagggcgatcggtgcgggcctcttcgctattacgccagctggcgaaagggggatgtgctgcaaggcgattaagttgggtaacgccagggttttcccagtcacgacgttgtaaaacgacggccagagaattc

SEQ ID NO: 731 - DNA, 1185 bp, synthetic construct; identical to SEQ ID NO: 721
  source 1..1185: mol_type = other DNA

SEQ ID NO: 732 - DNA, 1185 bp, synthetic construct; identical to SEQ ID NO: 722
  source 1..1185: mol_type = other DNA

SEQ ID NO: 733-739 - skipped (7 entries)

SEQ ID NO: 740 - DNA, 5866 bp, synthetic construct
  source 1..5866: mol_type = other DNA
ctcaaaggcggtaatacggttatccacagaatcaggggataacgcaggaaagaacatgtgagcaaaaggccagcaaaaggccaggaaccgtaaaaaggccgcgttgctggcgtttttccataggctccgcccccctgacgagcatcacaaaaatcgacgctcaagtcagaggtggcgaaacccgacaggactataaagataccaggcgtttccccctggaagctccctcgtgcgctctcctgttccgaccctgccgcttaccggatacctgtccgcctttctcccttcgggaagcgtggcgctttctcatagctcacgctgtaggtatctcagttcggtgtaggtcgttcgctccaagctgggctgtgtgcacgaaccccccgttcagcccgaccgctgcgccttatccggtaactatcgtcttgagtccaacccggtaagacacgacttatcgccactggcagcagccactggtaacaggattagcagagcgaggtatgtaggcggtgctacagagttcttgaagtggtggcctaactacggctacactagaagaacagtatttggtatctgcgctctgctgaagccagttaccttcggaaaaagagttggtagctcttgatccggcaaacaaaccaccgctggtagcggtggtttttttgtttgcaagcagcagattacgcgcagaaaaaaaggatctcaagaagatcctttgatcttttctacggggtctgacgctcagtggaacgaaaactcacgttaagggattttggtcatgagattatcaaaaaggatcttcacctagatccttttaaattaaaaatgaagttttaaatcaagcccaatctgaataatgttacaaccaattaaccaattctgattagaaaaactcatcgagcatcaaatgaaactgcaatttattcatatcaggattatcaataccatatttttgaaaaagccgtttctgtaatgaaggagaaaactcaccgaggcagttccataggatggcaagatcctggtatcggtctgcgattccgactcgtccaacatcaatacaacctattaatttcccctcgtcaaaaataaggttatcaagtgagaaatcaccatgagtgacgactgaatccggtgagaatggcaaaagtttatgcatttctttccagacttgttcaacaggccagccattacgctcgtcatcaaaatcactcgcatcaaccaaaccgttattcattcgtgattgcgcctgagcgagacgaaatacgcgatcgctgttaaaaggacaattacaaacaggaatcgaatgcaaccggcgcaggaacactgccagcgcatcaacaatattttcacctgaatcaggatattcttctaatacctggaatgctgtttttccggggatcgcagtggtgagtaaccatgcatcatcaggagtacggataaaatgcttgatggtcggaagaggcataaattccgtcagccagtttagtctgaccatctcatctgtaacatcattggcaacgctacctttgccatgtttcagaaacaactctggcgcatcgggcttcccatacaagcgatagattgtcgcacctgattgcccgacattatcgcgagcccatttatacccatataaatcagcatccatgttggaatttaatcgcggcctcgacgtttcccgttgaatatggctcataacaccccttgtattactgtttatgtaagcagacagttttattgttcatgatgatatatttttatcttgtgcaatgtaacatcagagattttgagacacgggccagagctgcatcgcgcgtttcggtgatgacggtgaaaacctctgacacatgcagctcccggagacggtcacagcttgtctgtaagcggatgccgggagcagacaagcccgtcagggcgcgtcagcgggtgttggcgggtgtcggggctggcttaactatgcggcatcagagcagattgtactgagagtgcaccatatgcggtgtgaaataccgcacagatgcgtaaggagaaaataccgcatcaggcgccattcgccattcaggctgcgcaactgttgggaagggcgatcggtgcgggcctcttcgctattacgccagctggcgaaagggggatgtgctgcaaggcgattaagttgggtaacgccagggttttcccagtcacgacgttgtaaaacgacggccagagaattcttggccactccctctctgcgcgctcgctcgctcactgaggccgggcgaccaaaggtcgcccgacgcccgggctttgcccgggcggcctcagtgagcgagcgagcgcgcagagagggagtggccaactccatcactaggggttcctagatctactagttaggtcagtgaagagaagaacaaaaagcagcatattacagttagttgtcttcatcaatctttaaatatgttgtgtggtttttctctccctgtttccacagttgaggacccccagggcgacgctgcccagaagacggacacgtcgcaccacgaccaggaccaccccaccttcaacaagatcactcccaatctcgcggagttcgcgttctcgctctaccgccagctcgcgcaccagagcaactcgactaacatcttcttctcgcccgtcagcatcgcgacggcgttcgcgatgctcagcctcggcacgaaggcggacacgcacgacgagatcctcgagggcctcaacttcaatctcacagagatcccagaagcccagatccacgagggcttccaggagctgctgcggacgctcaaccagcctgactcgcagctccagctcacgacgggcaatgggctcttcctcagcgagggcctcaagctcgtcgacaagttcctggaggacgtcaagaagctctaccactcggaagccttcacggtcaacttcggcgacacagaggaagccaagaagcagatcaacgactacgtcgagaaggggactcagggcaagatcgtcgacctcgtcaaggagctggaccgagacacggtcttcgcactggtcaactacatcttcttcaaggggaagtgggagcgccccttcgaagtcaaggacacagaggaggaggacttccacgtcgaccaggtgacgacggtcaaggttcccatgatgaagcgcctcggcatgttcaacatccagcactgcaagaagctcagctcgtgggtcctcctcatgaagtacctcggcaacgcgacggcgatcttcttccttcctgacgagggcaagctccagcacctcgagaacgagctgacgcacgacatcatcacgaagttcctggagaacgaggaccgccgatcggcgtcgctccaccttccaaagctcagcatcacgggcacctacgacctcaagtcggtcctcggccagctcggcatcacgaaggtcttctcgaatggtgccgacctcagcggcgtcacagaggaagcccccctcaagctcagcaaggctgtgcacaaggctgtgctcacgatcgacgagaaggggacagaggctgccggtgccatgttcctggaagccatccccatgagcatcccaccagaagtcaagttcaacaagcctttcgtcttcctgatgatagagcagaacacgaagtcgcccctcttcatgggcaaggtcgtcaaccccactcaaaagtaacagacatgataagatacattgatgagtttggacaaaccacaactagaatgcagtgaaaaaaatgctttatttgtgaaatttgtgatgctattgctttatttgtaaccattataagctgcaataaacaagttaacaacaacaattgcattcattttatgtttcaggttcagggggaggtgtgggaggttttttggggataccccctagagccccagctggttctttccgcctcagaagccatagagcccaccgcatccccagcatgcctgctattgtcttcccaatcctcccccttgctgtcctgccccaccccaccccccagaatagaatgacacctactcagacaatgcgatgcaatttcctcattttattaggaaaggacagtgggagtggcaccttccagggtcaaggaaggcacgggggaggggcaaacaacagatggctggcaactagaaggcacagtcgaggttacttctgggtggggttcaccaccttgcccatgaacagggggctcttggtgttctgctcgatcatcaggaacacgaaaggcttgttgaacttcacctcgggggggatgctcatggggatggcctccaggaacatggcgccggcggcctcggtgcccttctcgtcgatggtcagcacggccttgtgcacggccttgctcagcttcaggggggcctcctcggtcacgccgctcaggtcggcgccgttgctgaacaccttggtgatgcccagctggcccagcacgctcttcaggtcgtaggtgccggtgatgctcagcttgggcaggtgcaggctggcgctcctcctgtcctcgttctccaggaacttggtgatgatgtcgtgggtcagctcgttctccaggtgctgcagcttgccctcgtcgggcaggaagaagatggcggtggcgttgcccaggtacttcatcagcagcacccagctgctcagcttcttgcagtgctggatattgaacatgcccagcctcttcatcatgggcaccttcacggtggtcacctggtccacgtggaagtcctcctcctcggtgtccttcacctcgaagggcctctcccacttgcccttgaagaagatgtagttcaccagggcgaacacggtgtccctgtccagctccttcaccaggtccacgatcttgccctgggtgcccttctccacgtagtcgttgatctgcttcttggcctcctcggtgtcgccgaagttcacggtgaaggcctcgctgtggtacagcttcttcacgtcctccaggaacttgtccaccagcttcaggccctcgctcaggaacaggccgttgccggtggtcagctgcagctggctgtcgggctggttcagggtcctcagcagctcctggaagccctcgtggatctgggcctcggggatctcggtcaggttgaagttcaggccctccaggatctcgtcgtgggtgtcggccttggtgcccaggctcagcatggcgaaggcggtggcgatgctcacggggctgaagaagatgttggtgctgttgctctggtgggccagctgcctgtacaggctgaaggcgaactcggccaggttgggggtgatcttgttgaaggtggggtggtcctggtcgtggtggctggtgtcggtcttctgggcggcgtcgccctgggggtcctcaactgtggaaacagggagagaaaaaccacacaacatatttaaagattgatgaagacaactaactgtaatatgctgctttttgttcttctcttcactgacctaactagtagatctaggaacccctagtgatggagttggccactccctctctgcgcgctcgctcgctcactgaggccgcccgggcaaagcccgggcgtcgggcgacctttggtcgcccggcctcagtgagcgagcgagcgcgcagagagggagtggccaaacgcgtggtgtaatcatggtcatagctgtttcctgtgtgaaattgttatccgctcacaattccacacaacatacgagccggaagcataaagtgtaaagcctggggtgcctaatgagtgagctaactcacattaattgcgttgcgctcactgcccgctttccagtcgggaaacctgtcgtgccagctgcattaatgaatcggccaacgcgcggggagaggcggtttgcgtattgggcgctcttccgcttcctcgctcactgactcgctgcgctcggtcgttcggctgcggcgagcggtatcagctca

SEQ ID NO: 741 - DNA, 1182 bp, synthetic construct
  source 1..1182: mol_type = other DNA
gaggacccccagggcgacgctgcccagaagacggacacgtcgcaccacgaccaggaccaccccaccttcaacaagatcactcccaatctcgcggagttcgcgttctcgctctaccgccagctcgcgcaccagagcaactcgactaacatcttcttctcgcccgtcagcatcgcgacggcgttcgcgatgctcagcctcggcacgaaggcggacacgcacgacgagatcctcgagggcctcaacttcaatctcacagagatcccagaagcccagatccacgagggcttccaggagctgctgcggacgctcaaccagcctgactcgcagctccagctcacgacgggcaatgggctcttcctcagcgagggcctcaagctcgtcgacaagttcctggaggacgtcaagaagctctaccactcggaagccttcacggtcaacttcggcgacacagaggaagccaagaagcagatcaacgactacgtcgagaaggggactcagggcaagatcgtcgacctcgtcaaggagctggaccgagacacggtcttcgcactggtcaactacatcttcttcaaggggaagtgggagcgccccttcgaagtcaaggacacagaggaggaggacttccacgtcgaccaggtgacgacggtcaaggttcccatgatgaagcgcctcggcatgttcaacatccagcactgcaagaagctcagctcgtgggtcctcctcatgaagtacctcggcaacgcgacggcgatcttcttccttcctgacgagggcaagctccagcacctcgagaacgagctgacgcacgacatcatcacgaagttcctggagaacgaggaccgccgatcggcgtcgctccaccttccaaagctcagcatcacgggcacctacgacctcaagtcggtcctcggccagctcggcatcacgaaggtcttctcgaatggtgccgacctcagcggcgtcacagaggaagcccccctcaagctcagcaaggctgtgcacaaggctgtgctcacgatcgacgagaaggggacagaggctgccggtgccatgttcctggaagccatccccatgagcatcccaccagaagtcaagttcaacaagcctttcgtcttcctgatgatagagcagaacacgaagtcgcccctcttcatgggcaaggtcgtcaaccccactcaaaag

SEQ ID NO: 742 - DNA, 1185 bp, synthetic construct
  source 1..1185: mol_type = other DNA
gaggacccccagggcgacgccgcccagaagaccgacaccagccaccacgaccaggaccaccccaccttcaacaagatcacccccaacctggccgagttcgccttcagcctgtacaggcagctggcccaccagagcaacagcaccaacatcttcttcagccccgtgagcatcgccaccgccttcgccatgctgagcctgggcaccaaggccgacacccacgacgagatcctggagggcctgaacttcaacctgaccgagatccccgaggcccagatccacgagggcttccaggagctgctgaggaccctgaaccagcccgacagccagctgcagctgaccaccggcaacggcctgttcctgagcgagggcctgaagctggtggacaagttcctggaggacgtgaagaagctgtaccacagcgaggccttcaccgtgaacttcggcgacaccgaggaggccaagaagcagatcaacgactacgtggagaagggcacccagggcaagatcgtggacctggtgaaggagctggacagggacaccgtgttcgccctggtgaactacatcttcttcaagggcaagtgggagaggcccttcgaggtgaaggacaccgaggaggaggacttccacgtggaccaggtgaccaccgtgaaggtgcccatgatgaagaggctgggcatgttcaatatccagcactgcaagaagctgagcagctgggtgctgctgatgaagtacctgggcaacgccaccgccatcttcttcctgcccgacgagggcaagctgcagcacctggagaacgagctgacccacgacatcatcaccaagttcctggagaacgaggacaggaggagcgccagcctgcacctgcccaagctgagcatcaccggcacctacgacctgaagagcgtgctgggccagctgggcatcaccaaggtgttcagcaacggcgccgacctgagcggcgtgaccgaggaggcccccctgaagctgagcaaggccgtgcacaaggccgtgctgaccatcgacgagaagggcaccgaggccgccggcgccatgttcctggaggccatccccatgagcatcccccccgaggtgaagttcaacaagcctttcgtgttcctgatgatcgagcagaacaccaagagccccctgttcatgggcaaggtggtgaaccccacccagaagtaa

SEQ ID NO: 743-749 - skipped (7 entries)

SEQ ID NO: 750 - DNA, 5950 bp, synthetic construct
  source 1..5950: mol_type = other DNA
ttggccactccctctctgcgcgctcgctcgctcactgaggccgggcgaccaaaggtcgcccgacgcccgggctttgcccgggcggcctcagtgagcgagcgagcgcgcagagagggagtggccaactccatcactaggggttcctagatctactagtataacttcgtatagcatacattatacgaagttatatgtatgctaggtcagtgaagagaagaacaaaaagcagcatattacagttagttgtcttcatcaatctttaaatatgttgtgtggtttttctctccctgtttccacagttgaggacccccagggcgacgctgcccagaagacggacacgtcgcaccacgaccaggaccaccccaccttcaacaagatcactcccaatctcgcggagttcgcgttctcgctctaccgccagctcgcgcaccagagcaactcgactaacatcttcttctcgcccgtcagcatcgcgacggcgttcgcgatgctcagcctcggcacgaaggcggacacgcacgacgagatcctcgagggcctcaacttcaatctcacagagatcccagaagcccagatccacgagggcttccaggagctgctgcggacgctcaaccagcctgactcgcagctccagctcacgacgggcaatgggctcttcctcagcgagggcctcaagctcgtcgacaagttcctggaggacgtcaagaagctctaccactcggaagccttcacggtcaacttcggcgacacagaggaagccaagaagcagatcaacgactacgtcgagaaggggactcagggcaagatcgtcgacctcgtcaaggagctggaccgagacacggtcttcgcactggtcaactacatcttcttcaaggggaagtgggagcgccccttcgaagtcaaggacacagaggaggaggacttccacgtcgaccaggtgacgacggtcaaggttcccatgatgaagcgcctcggcatgttcaacatccagcactgcaagaagctcagctcgtgggtcctcctcatgaagtacctcggcaacgcgacggcgatcttcttccttcctgacgagggcaagctccagcacctcgagaacgagctgacgcacgacatcatcacgaagttcctggagaacgaggaccgccgatcggcgtcgctccaccttccaaagctcagcatcacgggcacctacgacctcaagtcggtcctcggccagctcggcatcacgaaggtcttctcgaatggtgccgacctcagcggcgtcacagaggaagcccccctcaagctcagcaaggctgtgcacaaggctgtgctcacgatcgacgagaaggggacagaggctgccggtgccatgttcctggaagccatccccatgagcatcccaccagaagtcaagttcaacaagcctttcgtcttcctgatgatagagcagaacacgaagtcgcccctcttcatgggcaaggtcgtcaaccccactcaaaagtaacagacatgataagatacattgatgagtttggacaaaccacaactagaatgcagtgaaaaaaatgctttatttgtgaaatttgtgatgctattgctttatttgtaaccattataagctgcaataaacaagttaacaacaacaattgcattcattttatgtttcaggttcagggggaggtgtgggaggttttttggggataccccctagagccccagctggttctttccgcctcagaagccatagagcccaccgcatccccagcatgcctgctattgtcttcccaatcctcccccttgctgtcctgccccaccccaccccccagaatagaatgacacctactcagacaatgcgatgcaatttcctcattttattaggaaaggacagtgggagtggcaccttccagggtcaaggaaggcacgggggaggggcaaacaacagatggctggcaactagaaggcacagtcgaggttacttctgggtggggttcaccaccttgcccatgaacagggggctcttggtgttctgctcgatcatcaggaacacgaaaggcttgttgaacttcacctcgggggggatgctcatggggatggcctccaggaacatggcgccggcggcctcggtgcccttctcgtcgatggtcagcacggccttgtgcacggccttgctcagcttcaggggggcctcctcggtcacgccgctcaggtcggcgccgttgctgaacaccttggtgatgcccagctggcccagcacgctcttcaggtcgtaggtgccggtgatgctcagcttgggcaggtgcaggctggcgctcctcctgtcctcgttctccaggaacttggtgatgatgtcgtgggtcagctcgttctccaggtgctgcagcttgccctcgtcgggcaggaagaagatggcggtggcgttgcccaggtacttcatcagcagcacccagctgctcagcttcttgcagtgctggatattgaacatgcccagcctcttcatcatgggcaccttcacggtggtcacctggtccacgtggaagtcctcctcctcggtgtccttcacctcgaagggcctctcccacttgcccttgaagaagatgtagttcaccagggcgaacacggtgtccctgtccagctccttcaccaggtccacgatcttgccctgggtgcccttctccacgtagtcgttgatctgcttcttggcctcctcggtgtcgccgaagttcacggtgaaggcctcgctgtggtacagcttcttcacgtcctccaggaacttgtccaccagcttcaggccctcgctcaggaacaggccgttgccggtggtcagctgcagctggctgtcgggctggttcagggtcctcagcagctcctggaagccctcgtggatctgggcctcggggatctcggtcaggttgaagttcaggccctccaggatctcgtcgtgggtgtcggccttggtgcccaggctcagcatggcgaaggcggtggcgatgctcacggggctgaagaagatgttggtgctgttgctctggtgggccagctgcctgtacaggctgaaggcgaactcggccaggttgggggtgatcttgttgaaggtggggtggtcctggtcgtggtggctggtgtcggtcttctgggcggcgtcgccctgggggtcctcaactgtggaaacagggagagaaaaaccacacaacatatttaaagattgatgaagacaactaactgtaatatgctgctttttgttcttctcttcactgacctaatgtatgcataacttcgtatagcatacattatacgaagttatactagtagatctaggaacccctagtgatggagttggccactccctctctgcgcgctcgctcgctcactgaggccgcccgggcaaagcccgggcgtcgggcgacctttggtcgcccggcctcagtgagcgagcgagcgcgcagagagggagtggccaaacgcgtggtgtaatcatggtcatagctgtttcctgtgtgaaattgttatccgctcacaattccacacaacatacgagccggaagcataaagtgtaaagcctggggtgcctaatgagtgagctaactcacattaattgcgttgcgctcactgcccgctttccagtcgggaaacctgtcgtgccagctgcattaatgaatcggccaacgcgcggggagaggcggtttgcgtattgggcgctcttccgcttcctcgctcactgactcgctgcgctcggtcgttcggctgcggcgagcggtatcagctcactcaaaggcggtaatacggttatccacagaatcaggggataacgcaggaaagaacatgtgagcaaaaggccagcaaaaggccaggaaccgtaaaaaggccgcgttgctggcgtttttccataggctccgcccccctgacgagcatcacaaaaatcgacgctcaagtcagaggtggcgaaacccgacaggactataaagataccaggcgtttccccctggaagctccctcgtgcgctctcctgttccgaccctgccgcttaccggatacctgtccgcctttctcccttcgggaagcgtggcgctttctcatagctcacgctgtaggtatctcagttcggtgtaggtcgttcgctccaagctgggctgtgtgcacgaaccccccgttcagcccgaccgctgcgccttatccggtaactatcgtcttgagtccaacccggtaagacacgacttatcgccactggcagcagccactggtaacaggattagcagagcgaggtatgtaggcggtgctacagagttcttgaagtggtggcctaactacggctacactagaagaacagtatttggtatctgcgctctgctgaagccagttaccttcggaaaaagagttggtagctcttgatccggcaaacaaaccaccgctggtagcggtggtttttttgtttgcaagcagcagattacgcgcagaaaaaaaggatctcaagaagatcctttgatcttttctacggggtctgacgctcagtggaacgaaaactcacgttaagggattttggtcatgagattatcaaaaaggatcttcacctagatccttttaaattaaaaatgaagttttaaatcaagcccaatctgaataatgttacaaccaattaaccaattctgattagaaaaactcatcgagcatcaaatgaaactgcaatttattcatatcaggattatcaataccatatttttgaaaaagccgtttctgtaatgaaggagaaaactcaccgaggcagttccataggatggcaagatcctggtatcggtctgcgattccgactcgtccaacatcaatacaacctattaatttcccctcgtcaaaaataaggttatcaagtgagaaatcaccatgagtgacgactgaatccggtgagaatggcaaaagtttatgcatttctttccagacttgttcaacaggccagccattacgctcgtcatcaaaatcactcgcatcaaccaaaccgttattcattcgtgattgcgcctgagcgagacgaaatacgcgatcgctgttaaaaggacaattacaaacaggaatcgaatgcaaccggcgcaggaacactgccagcgcatcaacaatattttcacctgaatcaggatattcttctaatacctggaatgctgtttttccggggatcgcagtggtgagtaaccatgcatcatcaggagtacggataaaatgcttgatggtcggaagaggcataaattccgtcagccagtttagtctgaccatctcatctgtaacatcattggcaacgctacctttgccatgtttcagaaacaactctggcgcatcgggcttcccatacaagcgatagattgtcgcacctgattgcccgacattatcgcgagcccatttatacccatataaatcagcatccatgttggaatttaatcgcggcctcgacgtttcccgttgaatatggctcataacaccccttgtattactgtttatgtaagcagacagttttattgttcatgatgatatatttttatcttgtgcaatgtaacatcagagattttgagacacgggccagagctgcatcgcgcgtttcggtgatgacggtgaaaacctctgacacatgcagctcccggagacggtcacagcttgtctgtaagcggatgccgggagcagacaagcccgtcagggcgcgtcagcgggtgttggcgggtgtcggggctggcttaactatgcggcatcagagcagattgtactgagagtgcaccatatgcggtgtgaaataccgcacagatgcgtaaggagaaaataccgcatcaggcgccattcgccattcaggctgcgcaactgttgggaagggcgatcggtgcgggcctcttcgctattacgccagctggcgaaagggggatgtgctgcaaggcgattaagttgggtaacgccagggttttcccagtcacgacgttgtaaaacgacggccagagaattc

SEQ ID NO: 751 - DNA, 1182 bp, synthetic construct; identical to SEQ ID NO: 741
  source 1..1182: mol_type = other DNA

SEQ ID NO: 752 - DNA, 1185 bp, synthetic construct; identical to SEQ ID NO: 742
  source 1..1185: mol_type = other DNA

SEQ ID NO: 753-759 - skipped (7 entries)

SEQ ID NO: 760 - DNA, 5866 bp, synthetic construct
  source 1..5866: mol_type = other DNA
ttggccactccctctctgcgcgctcgctcgctcactgaggccgggcgaccaaaggtcgcccgacgcccgggctttgcccgggcggcctcagtgagcgagcgagcgcgcagagagggagtggccaactccatcactaggggttcctagatctactagttaggtcagtgaagagaagaacaaaaagcagcatattacagttagttgtcttcatcaatctttaaatatgttgtgtggtttttctctccctgtttccacagttgaggacccccagggagatgcagcccagaagacagacaccagccaccatgaccaggaccaccccaccttcaacaagatcacccccaacctggcagagtttgccttcagcctgtacaggcagctggcccaccagagcaacagcaccaacatcttcttcagcccagtgagcatagccacagcctttgccatgctgagcctgggcaccaaggcagacacccatgatgagatcctggagggcctgaacttcaacctgacagagatcccagaggcccagatccatgagggcttccaggagctgctgaggaccctgaaccagccagacagccagctgcagctgaccacaggcaatggcctgttcctgtctgagggcctgaagctggtggacaagttcctggaggatgtgaagaagctgtaccactctgaggccttcacagtgaactttggagacacagaggaggccaagaagcagatcaatgactatgtggagaagggcacccagggcaagatagtggacctggtgaaggagctggacagggacacagtgtttgccctggtgaactacatcttcttcaagggcaagtgggagaggccctttgaggtgaaggacacagaggaggaggacttccatgtggaccaggtgaccacagtgaaggtgcccatgatgaagaggctgggcatgttcaacatccagcactgcaagaagctgagcagctgggtgctgctgatgaagtacctgggcaatgccacagccatcttcttcctgccagatgagggcaagctgcagcacctggagaatgagctgacccatgacatcatcaccaagttcctggagaatgaggacaggaggtctgccagcctgcacctgcccaagctgagcatcacaggcacctatgacctgaagtctgtgctgggccagctgggcatcaccaaggtgttcagcaatggagcagacctgtctggagtgacagaggaggcccccctgaagctgagcaaggcagtgcacaaggcagtgctgaccatagatgagaagggcacagaggcagcaggagccatgttcctggaggccatccccatgagcatccccccagaggtgaagttcaacaagccctttgtgttcctgatgatagagcagaacaccaagagccccctgttcatgggcaaggtggtgaaccccacccagaagtaacagacatgataagatacattgatgagtttggacaaaccacaactagaatgcagtgaaaaaaatgctttatttgtgaaatttgtgatgctattgctttatttgtaaccattataagctgcaataaacaagttaacaacaacaattgcattcattttatgtttcaggttcagggggaggtgtgggaggttttttggggataccccctagagccccagctggttcttttctcctcagaagccatagagcccatctcatccccagcatgcctgctattgtcttcccaatcctcccccttgctgtcctgccccaccccaccccccagaatagaatgacacctactcagacaattctatgcaatttcctcattttattaggaaaggacagtgggagtggcaccttccagggtcaaggaaggcatgggggaggggcaaacaacagatggctggcaactagaaggcacagtctaggttatttttgggtgggattcaccacttttcccatgaagaggggagacttggtattttgttcaatcattaagaagacaaagggtttgttgaacttgacctctggggggatagacatgggtatggcctctaaaaacatggccccagcagcttcagtccctttctcatctatggtcagcacagccttatgcactgccttggagagcttcaggggtgcctcctctgtgaccccagagaggtcagccccattgctgaagaccttagtgatgcccagttgacccaggacagacttcagatcataggttccagtaatggacagtttgggtaaatgtaagctggcagaccttctgtcttcattttccaggaacttggtgatgatatcatgggtgagttcattttccaggtgctgtagtttcccctcatcaggcaggaagaagatggctgtggcattgcccaggtatttcatcagcagcacccagctggacagcttcttacagtgctggatgttaaacatgcctaatctcttcatcataggcaccttcactgtggtcacctggtccacatggaagtcctcttcctctgtgtccttgacttcaaagggtctctcccatttgcctttaaagaagatgtaattcaccagagcaaaaactgtgtctctgtcaagctccttgaccaaatccacaattttcccttgagtacccttctccacataatcattgatctgtttcttggcctcttctgtgtccccaaagttgacagtgaaggcttctgagtggtacaactttttaacatcctccaaaaacttatccactagcttcaggccctcagagaggaacaggccattgcctgtggtcagctggagctggctgtctggctggttgagggttctgaggagttcctggaagccttcatggatctgagcctctggaatctctgtgaggttgaaattcaggccctccaggatttcatcatgagtgtcagccttggtccccagggagagcattgcaaaggctgtagctatgctcactggggagaagaagatattggtgctgttggactggtgtgccagctgtctgtataggctgaaggcaaactcagccaggttgggggtgatcttgttgaaggttgggtgatcctgatcatggtgggatgtatctgtcttctgggcagcatctccctggggatcctcaactgtggaaacagggagagaaaaaccacacaacatatttaaagattgatgaagacaactaactgtaatatgctgctttttgttcttctcttcactgacctaactagtagatctaggaacccctagtgatggagttggccactccctctctgcgcgctcgctcgctcactgaggccgcccgggcaaagcccgggcgtcgggcgacctttggtcgcccggcctcagtgagcgagcgagcgcgcagagagggagtggccaaacgcgtggtgtaatcatggtcatagctgtttcctgtgtgaaattgttatccgctcacaattccacacaacatacgagccggaagcataaagtgtaaagcctggggtgcctaatgagtgagctaactcacattaattgcgttgcgctcactgcccgctttccagtcgggaaacctgtcgtgccagctgcattaatgaatcggccaacgcgcggggagaggcggtttgcgtattgggcgctcttccgcttcctcgctcactgactcgctgcgctcggtcgttcggctgcggcgagcggtatcagctcactcaaaggcggtaatacggttatccacagaatcaggggataacgcaggaaagaacatgtgagcaaaaggccagcaaaaggccaggaaccgtaaaaaggccgcgttgctggcgtttttccataggctccgcccccctgacgagcatcacaaaaatcgacgctcaagtcagaggtggcgaaacccgacaggactataaagataccaggcgtttccccctggaagctccctcgtgcgctctcctgttccgaccctgccgcttaccggatacctgtccgcctttctcccttcgggaagcgtggcgctttctcatagctcacgctgtaggtatctcagttcggtgtaggtcgttcgctccaagctgggctgtgtgcacgaaccccccgttcagcccgaccgctgcgccttatccggtaactatcgtcttgagtccaacccggtaagacacgacttatcgccactggcagcagccactggtaacaggattagcagagcgaggtatgtaggcggtgctacagagttcttgaagtggtggcctaactacggctacactagaagaacagtatttggtatctgcgctctgctgaagccagttaccttcggaaaaagagttggtagctcttgatccggcaaacaaaccaccgctggtagcggtggtttttttgtttgcaagcagcagattacgcgcagaaaaaaaggatctcaagaagatcctttgatcttttctacggggtctgacgctcagtggaacgaaaactcacgttaagggattttggtcatgagattatcaaaaaggatcttcacctagatccttttaaattaaaaatgaagttttaaatcaagcccaatctgaataatgttacaaccaattaaccaattctgattagaaaaactcatcgagcatcaaatgaaactgcaatttattcatatcaggattatcaataccatatttttgaaaaagccgtttctgtaatgaaggagaaaactcaccgaggcagttccataggatggcaagatcctggtatcggtctgcgattccgactcgtccaacatcaatacaacctattaatttcccctcgtcaaaaataaggttatcaagtgagaaatcaccatgagtgacgactgaatccggtgagaatggcaaaagtttatgcatttctttccagacttgttcaacaggccagccattacgctcgtcatcaaaatcactcgcatcaaccaaaccgttattcattcgtgattgcgcctgagcgagacgaaatacgcgatcgctgttaaaaggacaattacaaacaggaatcgaatgcaaccggcgcaggaacactgccagcgcatcaacaatattttcacctgaatcaggatattcttctaatacctggaatgctgtttttccggggatcgcagtggtgagtaaccatgcatcatcaggagtacggataaaatgcttgatggtcggaagaggcataaattccgtcagccagtttagtctgaccatctcatctgtaacatcattggcaacgctacctttgccatgtttcagaaacaactctggcgcatcgggcttcccatacaagcgatagattgtcgcacctgattgcccgacattatcgcgagcccatttatacccatataaatcagcatccatgttggaatttaatcgcggcctcgacgtttcccgttgaatatggctcataacaccccttgtattactgtttatgtaagcagacagttttattgttcatgatgatatatttttatcttgtgcaatgtaacatcagagattttgagacacgggccagagctgcatcgcgcgtttcggtgatgacggtgaaaacctctgacacatgcagctcccggagacggtcacagcttgtctgtaagcggatgccgggagcagacaagcccgtcagggcgcgtcagcgggtgttggcgggtgtcggggctggcttaactatgcggcatcagagcagattgtactgagagtgcaccatatgcggtgtgaaataccgcacagatgcgtaaggagaaaataccgcatcaggcgccattcgccattcaggctgcgcaactgttgggaagggcgatcggtgcgggcctcttcgctattacgccagctggcgaaagggggatgtgctgcaaggcgattaagttgggtaacgccagggttttcccagtcacgacgttgtaaaacgacggccagagaattc

SEQ ID NO: 761 - DNA, 1185 bp, synthetic construct
  source 1..1185: mol_type = other DNA
gaggacccccagggagatgcagcccagaagacagacaccagccaccatgaccaggaccaccccaccttcaacaagatcacccccaacctggcagagtttgccttcagcctgtacaggcagctggcccaccagagcaacagcaccaacatcttcttcagcccagtgagcatagccacagcctttgccatgctgagcctgggcaccaaggcagacacccatgatgagatcctggagggcctgaacttcaacctgacagagatcccagaggcccagatccatgagggcttccaggagctgctgaggaccctgaaccagccagacagccagctgcagctgaccacaggcaatggcctgttcctgtctgagggcctgaagctggtggacaagttcctggaggatgtgaagaagctgtaccactctgaggccttcacagtgaactttggagacacagaggaggccaagaagcagatcaatgactatgtggagaagggcacccagggcaagatagtggacctggtgaaggagctggacagggacacagtgtttgccctggtgaactacatcttcttcaagggcaagtgggagaggccctttgaggtgaaggacacagaggaggaggacttccatgtggaccaggtgaccacagtgaaggtgcccatgatgaagaggctgggcatgttcaacatccagcactgcaagaagctgagcagctgggtgctgctgatgaagtacctgggcaatgccacagccatcttcttcctgccagatgagggcaagctgcagcacctggagaatgagctgacccatgacatcatcaccaagttcctggagaatgaggacaggaggtctgccagcctgcacctgcccaagctgagcatcacaggcacctatgacctgaagtctgtgctgggccagctgggcatcaccaaggtgttcagcaatggagcagacctgtctggagtgacagaggaggcccccctgaagctgagcaaggcagtgcacaaggcagtgctgaccatagatgagaagggcacagaggcagcaggagccatgttcctggaggccatccccatgagcatccccccagaggtgaagttcaacaagccctttgtgttcctgatgatagagcagaacaccaagagccccctgttcatgggcaaggtggtgaaccccacccagaagtaa

SEQ ID NO: 762 - DNA, 1185 bp, synthetic construct
  source 1..1185: mol_type = other DNA
gaggatccccagggagatgctgcccagaagacagatacatcccaccatgatcaggatcacccaaccttcaacaagatcacccccaacctggctgagtttgccttcagcctatacagacagctggcacaccagtccaacagcaccaatatcttcttctccccagtgagcatagctacagcctttgcaatgctctccctggggaccaaggctgacactcatgatgaaatcctggagggcctgaatttcaacctcacagagattccagaggctcagatccatgaaggcttccaggaactcctcagaaccctcaaccagccagacagccagctccagctgaccacaggcaatggcctgttcctctctgagggcctgaagctagtggataagtttttggaggatgttaaaaagttgtaccactcagaagccttcactgtcaactttggggacacagaagaggccaagaaacagatcaatgattatgtggagaagggtactcaagggaaaattgtggatttggtcaaggagcttgacagagacacagtttttgctctggtgaattacatcttctttaaaggcaaatgggagagaccctttgaagtcaaggacacagaggaagaggacttccatgtggaccaggtgaccacagtgaaggtgcctatgatgaagagattaggcatgtttaacatccagcactgtaagaagctgtccagctgggtgctgctgatgaaatacctgggcaatgccacagccatcttcttcctgcctgatgaggggaaactacagcacctggaaaatgaactcacccatgatatcatcaccaagttcctggaaaatgaagacagaaggtctgccagcttacatttacccaaactgtccattactggaacctatgatctgaagtctgtcctgggtcaactgggcatcactaaggtcttcagcaatggggctgacctctctggggtcacagaggaggcacccctgaagctctccaaggcagtgcataaggctgtgctgaccatagatgagaaagggactgaagctgctggggccatgtttttagaggccatacccatgtctatccccccagaggtcaagttcaacaaaccctttgtcttcttaatgattgaacaaaataccaagtctcccctcttcatgggaaaagtggtgaatcccacccaaaaataa

SEQ ID NO: 763-769 - skipped (7 entries)

SEQ ID NO: 770 - DNA, 5862 bp, synthetic construct
  source 1..5862: mol_type = other DNA
ttggccactccctctctgcgcgctcgctcgctcactgaggccgggcgaccaaaggtcgcccgacgcccgggctttgcccgggcggcctcagtgagcgagcgagcgcgcagagagggagtggccaactccatcactaggggttcctagatctactagttaggtcagtgaagagaagaacaaaaagcagcatattacagttagttgtcttcatcaatctttaaatatgttgtgtggtttttctctccctgtttccacagttgaggacccccagggagatgcagcccagaagacagacaccagccaccatgaccaggaccaccccaccttcaacaagatcacccccaacctggcagagtttgccttcagcctgtacaggcagctggcccaccagagcaacagcaccaacatcttcttcagcccagtgagcatagccacagcctttgccatgctgagcctgggcaccaaggcagacacccatgatgagatcctggagggcctgaacttcaacctgacagagatcccagaggcccagatccatgagggcttccaggagctgctgaggaccctgaaccagccagacagccagctgcagctgaccacaggcaatggcctgttcctgtctgagggcctgaagctggtggacaagttcctggaggatgtgaagaagctgtaccactctgaggccttcacagtgaactttggagacacagaggaggccaagaagcagatcaatgactatgtggagaagggcacccagggcaagatagtggacctggtgaaggagctggacagggacacagtgtttgccctggtgaactacatcttcttcaagggcaagtgggagaggccctttgaggtgaaggacacagaggaggaggacttccatgtggaccaggtgaccacagtgaaggtgcccatgatgaagaggctgggcatgttcaatatccagcactgcaagaagctgagcagctgggtgctgctgatgaagtacctgggcaatgccacagccatcttcttcctgccagatgagggcaagctgcagcacctggagaatgagctgacccatgacatcatcaccaagttcctggagaatgaggacaggaggtctgccagcctgcacctgcccaagctgagcatcacaggcacctatgacctgaagtctgtgctgggccagctgggcatcaccaaggtgttcagcaatggagcagacctgtctggagtgacagaggaggcccccctgaagctgagcaaggcagtgcacaaggcagtgctgaccatagatgagaagggcacagaggcagcaggagccatgttcctggaggccatccccatgagcatccccccagaggtgaagttcaacaagccttttgtgttcctgatgatagagcagaacaccaagagccccctgttcatgggcaaggtggtgaaccccacccagaagtaacagacatgataagatacattgatgagtttggacaaaccacaactagaatgcagtgaaaaaaatgctttatttgtgaaatttgtgatgctattgctttatttgtaaccattataagctgcaataaacaagttaacaacaacaattgcattcattttatgtttcaggttcagggggaggtgtgggaggttttttggggataccccctagagccccagctggttcttttctcctcagaagccatagagcccatctcatccccagcatgcctgctattgtcttcccaatcctcccccttgctgtcctgccccaccccaccccccagaatagaatgacacctactcagacaattctatgcaatttcctcattttattaggaaaggacagtgggagtggcaccttccagggtcaaggaaggcatgggggaggggcaaacaacagatggctggcaactagaaggcacagtctaggttatttttgggtgggattcaccacttttcccatgaagaggggtgatttagtgttctgctctatcatgagaaatacaaaaggtttgttgaacttgacctctggggggatagacatgggtatggcctctaaaaacatggccccagcagcctctgtgcccttctcatctatggtcagcacagccttatgcactgccttggagagcttcaggggtgcctcctctgtgaccccagagaggtcagccccattgctgaagaccttagtgatgcccagttgacccaggacagacttcagatcataggttccagtaatggacagtttgggtaaatgtaagctggcagaccttctgtcttcattttccaggaacttggtgatgatatcatgggtgagttcattttccaggtgctgtagtttcccctcatcaggcaggaagaagatggctgtggcattgcccaggtatttcatcagcagcacccagctggacagcttcttacagtgctggatattgaacataccaagccttttcatcataggcaccttcactgtggtcacctggtccacatggaagtcctcttcctctgtgtccttgacttcaaagggtctctcccatttgcctttaaagaagatgtaattcaccagagcaaaaactgtgtctctgtcaagctccttgaccaaatccacaattttcccttgagtacccttctccacataatcattgatctgtttcttggcctcttctgtgtccccaaagttgacagtgaaggcttctgagtggtacaactttttaacatcctccaaaaacttatccactagcttcaggccctcagagaggaacaggccattgcctgtggtcagctggagctggctgtctggctggttgagggttctgaggagttcctggaagccttcatggatctgagcctctggaatctctgtgaggttgaaattcaggccctccaggatttcatcatgagtgtcagccttggtccccagggagagcattgcaaaggctgtagctatgctcactggggagaagaagatattggtgctgttggactggtgtgccagctgtctgtataggctgaaggcaaactcagccaggttgggggtgatcttgttgaaggttgggtgatcctgatcatggtgggatgtatctgtcttctgggcagcatctccctggggatcctcaactgtggaaacagggagagaaaaaccacacaacatatttaaagattgatgaagacaactaactgtaatatgctgctttttgttcttctcttcactgacctaagagatctaggaacccctagtgatggagttggccactccctctctgcgcgctcgctcgctcactgaggccgcccgggcaaagcccgggcgtcgggcgacctttggtcgcccggcctcagtgagcgagcgagcgcgcagagagggagtggccaaacgcgtggtgtaatcatggtcatagctgtttcctgtgtgaaattgttatccgctcacaattccacacaacatacgagccggaagcataaagtgtaaagcctggggtgcctaatgagtgagctaactcacattaattgcgttgcgctcactgcccgctttccagtcgggaaacctgtcgtgccagctgcattaatgaatcggccaacgcgcggggagaggcggtttgcgtattgggcgctcttccgcttcctcgctcactgactcgctgcgctcggtcgttcggctgcggcgagcggtatcagctcactcaaaggcggtaatacggttatccacagaatcaggggataacgcaggaaagaacatgtgagcaaaaggccagcaaaaggccaggaaccgtaaaaaggccgcgttgctggcgtttttccataggctccgcccccctgacgagcatcacaaaaatcgacgctcaagtcagaggtggcgaaacccgacaggactataaagataccaggcgtttccccctggaagctccctcgtgcgctctcctgttccgaccctgccgcttaccggatacctgtccgcctttctcccttcgggaagcgtggcgctttctcatagctcacgctgtaggtatctcagttcggtgtaggtcgttcgctccaagctgggctgtgtgcacgaaccccccgttcagcccgaccgctgcgccttatccggtaactatcgtcttgagtccaacccggtaagacacgacttatcgccactggcagcagccactggtaacaggattagcagagcgaggtatgtaggcggtgctacagagttcttgaagtggtggcctaactacggctacactagaagaacagtatttggtatctgcgctctgctgaagccagttaccttcggaaaaagagttggtagctcttgatccggcaaacaaaccaccgctggtagcggtggtttttttgtttgcaagcagcagattacgcgcagaaaaaaaggatctcaagaagatcctttgatcttttctacggggtctgacgctcagtggaacgaaaactcacgttaagggattttggtcatgagattatcaaaaaggatcttcacctagatccttttaaattaaaaatgaagttttaaatcaagcccaatctgaataatgttacaaccaattaaccaattctgattagaaaaactcatcgagcatcaaatgaaactgcaatttattcatatcaggattatcaataccatatttttgaaaaagccgtttctgtaatgaaggagaaaactcaccgaggcagttccataggatggcaagatcctggtatcggtctgcgattccgactcgtccaacatcaatacaacctattaatttcccctcgtcaaaaataaggttatcaagtgagaaatcaccatgagtgacgactgaatccggtgagaatggcaaaagtttatgcatttctttccagacttgttcaacaggccagccattacgctcgtcatcaaaatcactcgcatcaaccaaaccgttattcattcgtgattgcgcctgagcgagacgaaatacgcgatcgctgttaaaaggacaattacaaacaggaatcgaatgcaaccggcgcaggaacactgccagcgcatcaacaatattttcacctgaatcaggatattcttctaatacctggaatgctgtttttccggggatcgcagtggtgagtaaccatgcatcatcaggagtacggataaaatgcttgatggtcggaagaggcataaattccgtcagccagtttagtctgaccatctcatctgtaacatcattggcaacgctacctttgccatgtttcagaaacaactctggcgcatcgggcttcccatacaagcgatagattgtcgcacctgattgcccgacattatcgcgagcccatttatacccatataaatcagcatccatgttggaatttaatcgcggcctcgacgtttcccgttgaatatggctcataacaccccttgtattactgtttatgtaagcagacagttttattgttcatgatgatatatttttatcttgtgcaatgtaacatcagagattttgagacacgggccagagctgcatcgcgcgtttcggtgatgacggtgaaaacctctgacacatgcagctcccggagacggtcacagcttgtctgtaagcggatgccgggagcagacaagcccgtcagggcgcgtcagcgggtgttggcgggtgtcggggctggcttaactatgcggcatcagagcagattgtactgagagtgcaccatatgcggtgtgaaataccgcacagatgcgtaaggagaaaataccgcatcaggcgccattcgccattcaggctgcgcaactgttgggaagggcgatcggtgcgggcctcttcgctattacgccagctggcgaaagggggatgtgctgcaaggcgattaagttgggtaacgccagggttttcccagtcacgacgttgtaaaacgacggccagagaattc

SEQ ID NO: 771 - DNA, 1185 bp, synthetic construct
  source 1..1185: mol_type = other DNA
gaggacccccagggagatgcagcccagaagacagacaccagccaccatgaccaggaccaccccaccttcaacaagatcacccccaacctggcagagtttgccttcagcctgtacaggcagctggcccaccagagcaacagcaccaacatcttcttcagcccagtgagcatagccacagcctttgccatgctgagcctgggcaccaaggcagacacccatgatgagatcctggagggcctgaacttcaacctgacagagatcccagaggcccagatccatgagggcttccaggagctgctgaggaccctgaaccagccagacagccagctgcagctgaccacaggcaatggcctgttcctgtctgagggcctgaagctggtggacaagttcctggaggatgtgaagaagctgtaccactctgaggccttcacagtgaactttggagacacagaggaggccaagaagcagatcaatgactatgtggagaagggcacccagggcaagatagtggacctggtgaaggagctggacagggacacagtgtttgccctggtgaactacatcttcttcaagggcaagtgggagaggccctttgaggtgaaggacacagaggaggaggacttccatgtggaccaggtgaccacagtgaaggtgcccatgatgaagaggctgggcatgttcaatatccagcactgcaagaagctgagcagctgggtgctgctgatgaagtacctgggcaatgccacagccatcttcttcctgccagatgagggcaagctgcagcacctggagaatgagctgacccatgacatcatcaccaagttcctggagaatgaggacaggaggtctgccagcctgcacctgcccaagctgagcatcacaggcacctatgacctgaagtctgtgctgggccagctgggcatcaccaaggtgttcagcaatggagcagacctgtctggagtgacagaggaggcccccctgaagctgagcaaggcagtgcacaaggcagtgctgaccatagatgagaagggcacagaggcagcaggagccatgttcctggaggccatccccatgagcatccccccagaggtgaagttcaacaagccttttgtgttcctgatgatagagcagaacaccaagagccccctgttcatgggcaaggtggtgaaccccacccagaagtaa

SEQ ID NO: 772 - DNA, 1185 bp, synthetic construct
  source 1..1185: mol_type = other DNA
gaggatccccagggagatgctgcccagaagacagatacatcccaccatgatcaggatcacccaaccttcaacaagatcacccccaacctggctgagtttgccttcagcctatacagacagctggcacaccagtccaacagcaccaatatcttcttctccccagtgagcatagctacagcctttgcaatgctctccctggggaccaaggctgacactcatgatgaaatcctggagggcctgaatttcaacctcacagagattccagaggctcagatccatgaaggcttccaggaactcctcagaaccctcaaccagccagacagccagctccagctgaccacaggcaatggcctgttcctctctgagggcctgaagctagtggataagtttttggaggatgttaaaaagttgtaccactcagaagccttcactgtcaactttggggacacagaagaggccaagaaacagatcaatgattatgtggagaagggtactcaagggaaaattgtggatttggtcaaggagcttgacagagacacagtttttgctctggtgaattacatcttctttaaaggcaaatgggagagaccctttgaagtcaaggacacagaggaagaggacttccatgtggaccaggtgaccacagtgaaggtgcctatgatgaaaaggcttggtatgttcaatatccagcactgtaagaagctgtccagctgggtgctgctgatgaaatacctgggcaatgccacagccatcttcttcctgcctgatgaggggaaactacagcacctggaaaatgaactcacccatgatatcatcaccaagttcctggaaaatgaagacagaaggtctgccagcttacatttacccaaactgtccattactggaacctatgatctgaagtctgtcctgggtcaactgggcatcactaaggtcttcagcaatggggctgacctctctggggtcacagaggaggcacccctgaagctctccaaggcagtgcataaggctgtgctgaccatagatgagaagggcacagaggctgctggggccatgtttttagaggccatacccatgtctatccccccagaggtcaagttcaacaaaccttttgtatttctcatgatagagcagaacactaaatcacccctcttcatgggaaaagtggtgaatcccacccaaaaataa

SEQ ID NO: 773-779 - skipped (7 entries)

SEQ ID NO: 780 - DNA, 5866 bp, synthetic construct
  source 1..5866: mol_type = other DNA
tgtaacatcagagattttgagacacgggccagagctgcatcgcgcgtttcggtgatgacggtgaaaacctctgacacatgcagctcccggagacggtcacagcttgtctgtaagcggatgccgggagcagacaagcccgtcagggcgcgtcagcgggtgttggcgggtgtcggggctggcttaactatgcggcatcagagcagattgtactgagagtgcaccatatgcggtgtgaaataccgcacagatgcgtaaggagaaaataccgcatcaggcgccattcgccattcaggctgcgcaactgttgggaagggcgatcggtgcgggcctcttcgctattacgccagctggcgaaagggggatgtgctgcaaggcgattaagttgggtaacgccagggttttcccagtcacgacgttgtaaaacgacggccagagaattcttggccactccctctctgcgcgctcgctcgctcactgaggccgggcgaccaaaggtcgcccgacgcccgggctttgcccgggcggcctcagtgagcgagcgagcgcgcagagagggagtggccaactccatcactaggggttcctagatctactagttaggtcagtgaagagaagaacaaaaagcagcatattacagttagttgtcttcatcaatctttaaatatgttgtgtggtttttctctccctgtttccacagttgaggacccccagggagatgctgcccagaagacagacacatctcaccatgaccaggaccaccccaccttcaacaagatcactcccaatcttgcagagtttgcattctctctctacagacagcttgcacaccagagcaactctactaacatcttcttctctccagtcagcatagcaacagcatttgcaatgctcagccttggcacaaaggcagacacacatgatgagatccttgagggcctcaacttcaatctcacagagatcccagaagcccagatccatgagggcttccaggagctgctgagaacactcaaccagcctgactctcagctccagctcacaacaggcaatgggctcttcctctctgagggcctcaagcttgtagacaagttcctggaggatgtcaagaagctctaccactctgaagccttcacagtcaactttggagacacagaggaagccaagaagcagatcaatgactatgtagagaaggggactcagggcaagatagtagaccttgtcaaggagctggacagagacacagtctttgcactggtcaactacatcttcttcaaggggaagtgggagagaccctttgaagtcaaggacacagaggaggaggacttccatgtagaccaggtgacaacagtcaaggttcccatgatgaagagacttggcatgttcaatatccagcactgcaagaagctcagctcttgggtcctcctcatgaagtaccttggcaatgcaacagcaatcttcttccttcctgatgagggcaagctccagcaccttgagaatgagctgacacatgacatcatcacaaagttcctggagaatgaggacagaaggtctgcatctctccaccttccaaagctcagcatcacaggcacctatgacctcaagtctgtccttggccagcttggcatcacaaaggtcttctctaatggtgcagacctctctggagtcacagaggaagcccccctcaagctcagcaaggctgtgcacaaggctgtgctcacaatagatgagaaggggacagaggctgcaggtgccatgttcctggaagccatccccatgagcatcccaccagaagtcaagttcaacaagccttttgtcttcctgatgatagagcagaacacaaagtctcccctcttcatgggcaaggtagtcaaccccactcaaaagtaacagacatgataagatacattgatgagtttggacaaaccacaactagaatgcagtgaaaaaaatgctttatttgtgaaatttgtgatgctattgctttatttgtaaccattataagctgcaataaacaagttaacaacaacaattgcattcattttatgtttcaggttcagggggaggtgtgggaggttttttggggataccccctagagccccagctggttcttttctcctcagaagccatagagcccatctcatccccagcatgcctgctattgtcttcccaatcctcccccttgctgtcctgccccaccccaccccccagaatagaatgacacctactcagacaattctatgcaatttcctcattttattaggaaaggacagtgggagtggcaccttccagggtcaaggaaggcatgggggaggggcaaacaacagatggctggcaactagaaggcacagtctaggttacttctgggtggggttcaccaccttgcccatgaacagggggctcttggtgttctgctctatcatcaggaacacaaaaggcttgttgaacttcacctctggggggatgctcatggggatggcctccaggaacatggctcctgctgcctctgtgcccttctcatctatggtcagcactgccttgtgcactgccttgctcagcttcaggggggcctcctctgtcactccagacaggtctgctccattgctgaacaccttggtgatgcccagctggcccagcacagacttcaggtcataggtgcctgtgatgctcagcttgggcaggtgcaggctggcagacctcctgtcctcattctccaggaacttggtgatgatgtcatgggtcagctcattctccaggtgctgcagcttgccctcatctggcaggaagaagatggctgtggcattgcccaggtacttcatcagcagcacccagctgctcagcttcttgcagtgctggatattgaacatgcccagcctcttcatcatgggcaccttcactgtggtcacctggtccacatggaagtcctcctcctctgtgtccttcacctcaaagggcctctcccacttgcccttgaagaagatgtagttcaccagggcaaacactgtgtccctgtccagctccttcaccaggtccactatcttgccctgggtgcccttctccacatagtcattgatctgcttcttggcctcctctgtgtctccaaagttcactgtgaaggcctcagagtggtacagcttcttcacatcctccaggaacttgtccaccagcttcaggccctcagacaggaacaggccattgcctgtggtcagctgcagctggctgtctggctggttcagggtcctcagcagctcctggaagccctcatggatctgggcctctgggatctctgtcaggttgaagttcaggccctccaggatctcatcatgggtgtctgccttggtgcccaggctcagcatggcaaaggctgtggctatgctcactgggctgaagaagatgttggtgctgttgctctggtgggccagctgcctgtacaggctgaaggcaaactctgccaggttgggggtgatcttgttgaaggtggggtggtcctggtcatggtggctggtgtctgtcttctgggctgcatctccctgggggtcctcaactgtggaaacagggagagaaaaaccacacaacatatttaaagattgatgaagacaactaactgtaatatgctgctttttgttcttctcttcactgacctaactagtagatctaggaacccctagtgatggagttggccactccctctctgcgcgctcgctcgctcactgaggccgcccgggcaaagcccgggcgtcgggcgacctttggtcgcccggcctcagtgagcgagcgagcgcgcagagagggagtggccaaacgcgtggtgtaatcatggtcatagctgtttcctgtgtgaaattgttatccgctcacaattccacacaacatacgagccggaagcataaagtgtaaagcctggggtgcctaatgagtgagctaactcacattaattgcgttgcgctcactgcccgctttccagtcgggaaacctgtcgtgccagctgcattaatgaatcggccaacgcgcggggagaggcggtttgcgtattgggcgctcttccgcttcctcgctcactgactcgctgcgctcggtcgttcggctgcggcgagcggtatcagctcactcaaaggcggtaatacggttatccacagaatcaggggataacgcaggaaagaacatgtgagcaaaaggccagcaaaaggccaggaaccgtaaaaaggccgcgttgctggcgtttttccataggctccgcccccctgacgagcatcacaaaaatcgacgctcaagtcagaggtggcgaaacccgacaggactataaagataccaggcgtttccccctggaagctccctcgtgcgctctcctgttccgaccctgccgcttaccggatacctgtccgcctttctcccttcgggaagcgtggcgctttctcatagctcacgctgtaggtatctcagttcggtgtaggtcgttcgctccaagctgggctgtgtgcacgaaccccccgttcagcccgaccgctgcgccttatccggtaactatcgtcttgagtccaacccggtaagacacgacttatcgccactggcagcagccactggtaacaggattagcagagcgaggtatgtaggcggtgctacagagttcttgaagtggtggcctaactacggctacactagaagaacagtatttggtatctgcgctctgctgaagccagttaccttcggaaaaagagttggtagctcttgatccggcaaacaaaccaccgctggtagcggtggtttttttgtttgcaagcagcagattacgcgcagaaaaaaaggatctcaagaagatcctttgatcttttctacggggtctgacgctcagtggaacgaaaactcacgttaagggattttggtcatgagattatcaaaaaggatcttcacctagatccttttaaattaaaaatgaagttttaaatcaagcccaatctgaataatgttacaaccaattaaccaattctgattagaaaaactcatcgagcatcaaatgaaactgcaatttattcatatcaggattatcaataccatatttttgaaaaagccgtttctgtaatgaaggagaaaactcaccgaggcagttccataggatggcaagatcctggtatcggtctgcgattccgactcgtccaacatcaatacaacctattaatttcccctcgtcaaaaataaggttatcaagtgagaaatcaccatgagtgacgactgaatccggtgagaatggcaaaagtttatgcatttctttccagacttgttcaacaggccagccattacgctcgtcatcaaaatcactcgcatcaaccaaaccgttattcattcgtgattgcgcctgagcgagacgaaatacgcgatcgctgttaaaaggacaattacaaacaggaatcgaatgcaaccggcgcaggaacactgccagcgcatcaacaatattttcacctgaatcaggatattcttctaatacctggaatgctgtttttccggggatcgcagtggtgagtaaccatgcatcatcaggagtacggataaaatgcttgatggtcggaagaggcataaattccgtcagccagtttagtctgaccatctcatctgtaacatcattggcaacgctacctttgccatgtttcagaaacaactctggcgcatcgggcttcccatacaagcgatagattgtcgcacctgattgcccgacattatcgcgagcccatttatacccatataaatcagcatccatgttggaatttaatcgcggcctcgacgtttcccgttgaatatggctcataacaccccttgtattactgtttatgtaagcagacagttttattgttcatgatgatatatttttatcttgtgcaa

SEQ ID NO: 781 - DNA, 1182 bp, synthetic construct
  source 1..1182: mol_type = other DNA
gaggacccccagggagatgctgcccagaagacagacacatctcaccatgaccaggaccaccccaccttcaacaagatcactcccaatcttgcagagtttgcattctctctctacagacagcttgcacaccagagcaactctactaacatcttcttctctccagtcagcatagcaacagcatttgcaatgctcagccttggcacaaaggcagacacacatgatgagatccttgagggcctcaacttcaatctcacagagatcccagaagcccagatccatgagggcttccaggagctgctgagaacactcaaccagcctgactctcagctccagctcacaacaggcaatgggctcttcctctctgagggcctcaagcttgtagacaagttcctggaggatgtcaagaagctctaccactctgaagccttcacagtcaactttggagacacagaggaagccaagaagcagatcaatgactatgtagagaaggggactcagggcaagatagtagaccttgtcaaggagctggacagagacacagtctttgcactggtcaactacatcttcttcaaggggaagtgggagagaccctttgaagtcaaggacacagaggaggaggacttccatgtagaccaggtgacaacagtcaaggttcccatgatgaagagacttggcatgttcaatatccagcactgcaagaagctcagctcttgggtcctcctcatgaagtaccttggcaatgcaacagcaatcttcttccttcctgatgagggcaagctccagcaccttgagaatgagctgacacatgacatcatcacaaagttcctggagaatgaggacagaaggtctgcatctctccaccttccaaagctcagcatcacaggcacctatgacctcaagtctgtccttggccagcttggcatcacaaaggtcttctctaatggtgcagacctctctggagtcacagaggaagcccccctcaagctcagcaaggctgtgcacaaggctgtgctcacaatagatgagaaggggacagaggctgcaggtgccatgttcctggaagccatccccatgagcatcccaccagaagtcaagttcaacaagccttttgtcttcctgatgatagagcagaacacaaagtctcccctcttcatgggcaaggtagtcaaccccactcaaaag

SEQ ID NO: 782 - DNA, 1185 bp, synthetic construct; identical to SEQ ID NO: 771
  source 1..1185: mol_type = other DNA

SEQ ID NO: 783-789 - skipped (7 entries)

SEQ ID NO: 790 - DNA, 5950 bp, synthetic construct
  source 1..5950: mol_type = other DNA
ttggccactccctctctgcgcgctcgctcgctcactgaggccgggcgaccaaaggtcgcccgacgcccgggctttgcccgggcggcctcagtgagcgagcgagcgcgcagagagggagtggccaactccatcactaggggttcctagatctactagtataacttcgtatagcatacattatacgaagttatatgtatgctaggtcagtgaagagaagaacaaaaagcagcatattacagttagttgtcttcatcaatctttaaatatgttgtgtggtttttctctccctgtttccacagttgaggacccccagggagatgctgcccagaagacagacacatctcaccatgaccaggaccaccccaccttcaacaagatcactcccaatcttgcagagtttgcattctctctctacagacagcttgcacaccagagcaactctactaacatcttcttctctccagtcagcatagcaacagcatttgcaatgctcagccttggcacaaaggcagacacacatgatgagatccttgagggcctcaacttcaatctcacagagatcccagaagcccagatccatgagggcttccaggagctgctgagaacactcaaccagcctgactctcagctccagctcacaacaggcaatgggctcttcctctctgagggcctcaagcttgtagacaagttcctggaggatgtcaagaagctctaccactctgaagccttcacagtcaactttggagacacagaggaagccaagaagcagatcaatgactatgtagagaaggggactcagggcaagatagtagaccttgtcaaggagctggacagagacacagtctttgcactggtcaactacatcttcttcaaggggaagtgggagagaccctttgaagtcaaggacacagaggaggaggacttccatgtagaccaggtgacaacagtcaaggttcccatgatgaagagacttggcatgttcaatatccagcactgcaagaagctcagctcttgggtcctcctcatgaagtaccttggcaatgcaacagcaatcttcttccttcctgatgagggcaagctccagcaccttgagaatgagctgacacatgacatcatcacaaagttcctggagaatgaggacagaaggtctgcatctctccaccttccaaagctcagcatcacaggcacctatgacctcaagtctgtccttggccagcttggcatcacaaaggtcttctctaatggtgcagacctctctggagtcacagaggaagcccccctcaagctcagcaaggctgtgcacaaggctgtgctcacaatagatgagaaggggacagaggctgcaggtgccatgttcctggaagccatccccatgagcatcccaccagaagtcaagttcaacaagccttttgtcttcctgatgatagagcagaacacaaagtctcccctcttcatgggcaaggtagtcaaccccactcaaaagtaacagacatgataagatacattgatgagtttggacaaaccacaactagaatgcagtgaaaaaaatgctttatttgtgaaatttgtgatgctattgctttatttgtaaccattataagctgcaataaacaagttaacaacaacaattgcattcattttatgtttcaggttcagggggaggtgtgggaggttttttggggataccccctagagccccagctggttcttttctcctcagaagccatagagcccatctcatccccagcatgcctgctattgtcttcccaatcctcccccttgctgtcctgccccaccccaccccccagaatagaatgacacctactcagacaattctatgcaatttcctcattttattaggaaaggacagtgggagtggcaccttccagggtcaaggaaggcatgggggaggggcaaacaacagatggctggcaactagaaggcacagtctaggttacttctgggtggggttcaccaccttgcccatgaacagggggctcttggtgttctgctctatcatcaggaacacaaaaggcttgttgaacttcacctctggggggatgctcatggggatggcctccaggaacatggctcctgctgcctctgtgcccttctcatctatggtcagcactgccttgtgcactgccttgctcagcttcaggggggcctcctctgtcactccagacaggtctgctccattgctgaacaccttggtgatgcccagctggcccagcacagacttcaggtcataggtgcctgtgatgctcagcttgggcaggtgcaggctggcagacctcctgtcctcattctccaggaacttggtgatgatgtcatgggtcagctcattctccaggtgctgcagcttgccctcatctggcaggaagaagatggctgtggcattgcccaggtacttcatcagcagcacccagctgctcagcttcttgcagtgctggatattgaacatgcccagcctcttcatcatgggcaccttcactgtggtcacctggtccacatggaagtcctcctcctctgtgtccttcacctcaaagggcctctcccacttgcccttgaagaagatgtagttcaccagggcaaacactgtgtccctgtccagctccttcaccaggtccactatcttgccctgggtgcccttctccacatagtcattgatctgcttcttggcctcctctgtgtctccaaagttcactgtgaaggcctcagagtggtacagcttcttcacatcctccaggaacttgtccaccagcttcaggccctcagacaggaacaggccattgcctgtggtcagctgcagctggctgtctggctggttcagggtcctcagcagctcctggaagccctcatggatctgggcctctgggatctctgtcaggttgaagttcaggccctccaggatctcatcatgggtgtctgccttggtgcccaggctcagcatggcaaaggctgtggctatgctcactgggctgaagaagatgttggtgctgttgctctggtgggccagctgcctgtacaggctgaaggcaaactctgccaggttgggggtgatcttgttgaaggtggggtggtcctggtcatggtggctggtgtctgtcttctgggctgcatctccctgggggtcctcaactgtggaaacagggagagaaaaaccacacaacatatttaaagattgatgaagacaactaactgtaatatgctgctttttgttcttctcttcactgacctaatgtatgcataacttcgtatagcatacattatacgaagttatactagtagatctaggaacccctagtgatggagttggccactccctctctgcgcgctcgctcgctcactgaggccgcccgggcaaagcccgggcgtcgggcgacctttggtcgcccggcctcagtgagcgagcgagcgcgcagagagggagtggccaaacgcgtggtgtaatcatggtcatagctgtttcctgtgtgaaattgttatccgctcacaattccacacaacatacgagccggaagcataaagtgtaaagcctggggtgcctaatgagtgagctaactcacattaattgcgttgcgctcactgcccgctttccagtcgggaaacctgtcgtgccagctgcattaatgaatcggccaacgcgcggggagaggcggtttgcgtattgggcgctcttccgcttcctcgctcactgactcgctgcgctcggtcgttcggctgcggcgagcggtatcagctcactcaaaggcggtaatacggttatccacagaatcaggggataacgcaggaaagaacatgtgagcaaaaggccagcaaaaggccaggaaccgtaaaaaggccgcgttgctggcgtttttccataggctccgcccccctgacgagcatcacaaaaatcgacgctcaagtcagaggtggcgaaacccgacaggactataaagataccaggcgtttccccctggaagctccctcgtgcgctctcctgttccgaccctgccgcttaccggatacctgtccgcctttctcccttcgggaagcgtggcgctttctcatagctcacgctgtaggtatctcagttcggtgtaggtcgttcgctccaagctgggctgtgtgcacgaaccccccgttcagcccgaccgctgcgccttatccggtaactatcgtcttgagtccaacccggtaagacacgacttatcgccactggcagcagccactggtaacaggattagcagagcgaggtatgtaggcggtgctacagagttcttgaagtggtggcctaactacggctacactagaagaacagtatttggtatctgcgctctgctgaagccagttaccttcggaaaaagagttggtagctcttgatccggcaaacaaaccaccgctggtagcggtggtttttttgtttgcaagcagcagattacgcgcagaaaaaaaggatctcaagaagatcctttgatcttttctacggggtctgacgctcagtggaacgaaaactcacgttaagggattttggtcatgagattatcaaaaaggatcttcacctagatccttttaaattaaaaatgaagttttaaatcaagcccaatctgaataatgttacaaccaattaaccaattctgattagaaaaactcatcgagcatcaaatgaaactgcaatttattcatatcaggattatcaataccatatttttgaaaaagccgtttctgtaatgaaggagaaaactcaccgaggcagttccataggatggcaagatcctggtatcggtctgcgattccgactcgtccaacatcaatacaacctattaatttcccctcgtcaaaaataaggttatcaagtgagaaatcaccatgagtgacgactgaatccggtgagaatggcaaaagtttatgcatttctttccagacttgttcaacaggccagccattacgctcgtcatcaaaatcactcgcatcaaccaaaccgttattcattcgtgattgcgcctgagcgagacgaaatacgcgatcgctgttaaaaggacaattacaaacaggaatcgaatgcaaccggcgcaggaacactgccagcgcatcaacaatattttcacctgaatcaggatattcttctaatacctggaatgctgtttttccggggatcgcagtggtgagtaaccatgcatcatcaggagtacggataaaatgcttgatggtcggaagaggcataaattccgtcagccagtttagtctgaccatctcatctgtaacatcattggcaacgctacctttgccatgtttcagaaacaactctggcgcatcgggcttcccatacaagcgatagattgtcgcacctgattgcccgacattatcgcgagcccatttatacccatataaatcagcatccatgttggaatttaatcgcggcctcgacgtttcccgttgaatatggctcataacaccccttgtattactgtttatgtaagcagacagttttattgttcatgatgatatatttttatcttgtgcaatgtaacatcagagattttgagacacgggccagagctgcatcgcgcgtttcggtgatgacggtgaaaacctctgacacatgcagctcccggagacggtcacagcttgtctgtaagcggatgccgggagcagacaagcccgtcagggcgcgtcagcgggtgttggcgggtgtcggggctggcttaactatgcggcatcagagcagattgtactgagagtgcaccatatgcggtgtgaaataccgcacagatgcgtaaggagaaaataccgcatcaggcgccattcgccattcaggctgcgcaactgttgggaagggcgatcggtgcgggcctcttcgctattacgccagctggcgaaagggggatgtgctgcaaggcgattaagttgggtaacgccagggttttcccagtcacgacgttgtaaaacgacggccagagaattc

SEQ ID NO: 791 - DNA, 1182 bp, synthetic construct; identical to SEQ ID NO: 781
  source 1..1182: mol_type = other DNA

SEQ ID NO: 792 - DNA, 1185 bp, synthetic construct; identical to SEQ ID NO: 771
  source 1..1185: mol_type = other DNA

SEQ ID NO: 793-794 - skipped (2 entries)

SEQ ID NO: 795 - DNA, 5950 bp, synthetic construct
  source 1..5950: mol_type = other DNA
ttggccactccctctctgcgcgctcgctcgctcactgaggccgggcgaccaaaggtcgcccgacgcccgggctttgcccgggcggcctcagtgagcgagcgagcgcgcagagagggagtggccaactccatcactaggggttcctagatctactagtataacttcgtatagcatacattatacgaagttatatgtatgctaggtcagtgaagagaagaacaaaaagcagcatattacagttagttgtcttcatcaatctttaaatatgttgtgtggtttttctctccctgtttccacagttgaggacccccagggagatgcagcccagaagacagacaccagccaccatgaccaggaccaccccaccttcaacaagatcacccccaacctggcagagtttgccttcagcctgtacaggcagctggcccaccagagcaacagcaccaacatcttcttcagcccagtgagcatagccacagcctttgccatgctgagcctgggcaccaaggcagacacccatgatgagatcctggagggcctgaacttcaacctgacagagatcccagaggcccagatccatgagggcttccaggagctgctgaggaccctgaaccagccagacagccagctgcagctgaccacaggcaatggcctgttcctgtctgagggcctgaagctggtggacaagttcctggaggatgtgaagaagctgtaccactctgaggccttcacagtgaactttggagacacagaggaggccaagaagcagatcaatgactatgtggagaagggcacccagggcaagatagtggacctggtgaaggagctggacagggacacagtgtttgccctggtgaactacatcttcttcaagggcaagtgggagaggccctttgaggtgaaggacacagaggaggaggacttccatgtggaccaggtgaccacagtgaaggtgcccatgatgaagaggctgggcatgttcaatatccagcactgcaagaagctgagcagctgggtgctgctgatgaagtacctgggcaatgccacagccatcttcttcctgccagatgagggcaagctgcagcacctggagaatgagctgacccatgacatcatcaccaagttcctggagaatgaggacaggaggtctgccagcctgcacctgcccaagctgagcatcacaggcacctatgacctgaagtctgtgctgggccagctgggcatcaccaaggtgttcagcaatggagcagacctgtctggagtgacagaggaggcccccctgaagctgagcaaggcagtgcacaaggcagtgctgaccatagatgagaagggcacagaggcagcaggagccatgttcctggaggccatccccatgagcatccccccagaggtgaagttcaacaagccttttgtgttcctgatgatagagcagaacaccaagagccccctgttcatgggcaaggtggtgaaccccacccagaagtaacagacatgataagatacattgatgagtttggacaaaccacaactagaatgcagtgaaaaaaatgctttatttgtgaaatttgtgatgctattgctttatttgtaaccattataagctgcaataaacaagttaacaacaacaattgcattcattttatgtttcaggttcagggggaggtgtgggaggttttttggggataccccctagagccccagctggttcttttctcctcagaagccatagagcccatctcatccccagcatgcctgctattgtcttcccaatcctcccccttgctgtcctgccccaccccaccccccagaatagaatgacacctactcagacaattctatgcaatttcctcattttattaggaaaggacagtgggagtggcaccttccagggtcaaggaaggcatgggggaggggcaaacaacagatggctggcaactagaaggcacagtctaggttatttttgggtgggattcaccacttttcccatgaagaggggtgatttagtgttctgctctatcatgagaaatacaaaaggtttgttgaacttgacctctggggggatagacatgggtatggcctctaaaaacatggccccagcagcctctgtgcccttctcatctatggtcagcacagccttatgcactgccttggagagcttcaggggtgcctcctctgtgaccccagagaggtcagccccattgctgaagaccttagtgatgcccagttgacccaggacagacttcagatcataggttccagtaatggacagtttgggtaaatgtaagctggcagaccttctgtcttcattttccaggaacttggtgatgatatcatgggtgagttcattttccaggtgctgtagtttcccctcatcaggcaggaagaagatggctgtggcattgcccaggtatttcatcagcagcacccagctggacagcttcttacagtgctggatattgaacataccaagccttttcatcataggcaccttcactgtggtcacctggtccacatggaagtcctcttcctctgtgtccttgacttcaaagggtctctcccatttgcctttaaagaagatgtaattcaccagagcaaaaactgtgtctctgtcaagctccttgaccaaatccacaattttcccttgagtacccttctccacataatcattgatctgtttcttggcctcttctgtgtccccaaagttgacagtgaaggcttctgagtggtacaactttttaacatcctccaaaaacttatccactagcttcaggccctcagagaggaacaggccattgcctgtggtcagctggagctggctgtctggctggttgagggttctgaggagttcctggaagccttcatggatctgagcctctggaatctctgtgaggttgaaattcaggccctccaggatttcatcatgagtgtcagccttggtccccagggagagcattgcaaaggctgtagctatgctcactggggagaagaagatattggtgctgttggactggtgtgccagctgtctgtataggctgaaggcaaactcagccaggttgggggtgatcttgttgaaggttgggtgatcctgatcatggtgggatgtatctgtcttctgggcagcatctccctggggatcctcaactgtggaaacagggagagaaaaaccacacaacatatttaaagattgatgaagacaactaactgtaatatgctgctttttgttcttctcttcactgacctaatgtatgcataacttcgtatagcatacattatacgaagttatactagtagatctaggaacccctagtgatggagttggccactccctctctgcgcgctcgctcgctcactgaggccgcccgggcaaagcccgggcgtcgggcgacctttggtcgcccggcctcagtgagcgagcgagcgcgcagagagggagtggccaaacgcgtggtgtaatcatggtcatagctgtttcctgtgtgaaattgttatccgctcacaattccacacaacatacgagccggaagcataaagtgtaaagcctggggtgcctaatgagtgagctaactcacattaattgcgttgcgctcactgcccgctttccagtcgggaaacctgtcgtgccagctgcattaatgaatcggccaacgcgcggggagaggcggtttgcgtattgggcgctcttccgcttcctcgctcactgactcgctgcgctcggtcgttcggctgcggcgagcggtatcagctcactcaaaggcggtaatacggttatccacagaatcaggggataacgcaggaaagaacatgtgagcaaaaggccagcaaaaggccaggaaccgtaaaaaggccgcgttgctggcgtttttccataggctccgcccccctgacgagcatcacaaaaatcgacgctcaagtcagaggtggcgaaacccgacaggactataaagataccaggcgtttccccctggaagctccctcgtgcgctctcctgttccgaccctgccgcttaccggatacctgtccgcctttctcccttcgggaagcgtggcgctttctcatagctcacgctgtaggtatctcagttcggtgtaggtcgttcgctccaagctgggctgtgtgcacgaaccccccgttcagcccgaccgctgcgccttatccggtaactatcgtcttgagtccaacccggtaagacacgacttatcgccactggcagcagccactggtaacaggattagcagagcgaggtatgtaggcggtgctacagagttcttgaagtggtggcctaactacggctacactagaagaacagtatttggtatctgcgctctgctgaagccagttaccttcggaaaaagagttggtagctcttgatccggcaaacaaaccaccgctggtagcggtggtttttttgtttgcaagcagcagattacgcgcagaaaaaaaggatctcaagaagatcctttgatcttttctacggggtctgacgctcagtggaacgaaaactcacgttaagggattttggtcatgagattatcaaaaaggatcttcacctagatccttttaaattaaaaatgaagttttaaatcaagcccaatctgaataatgttacaaccaattaaccaattctgattagaaaaactcatcgagcatcaaatgaaactgcaatttattcatatcaggattatcaataccatatttttgaaaaagccgtttctgtaatgaaggagaaaactcaccgaggcagttccataggatggcaagatcctggtatcggtctgcgattccgactcgtccaacatcaatacaacctattaatttcccctcgtcaaaaataaggttatcaagtgagaaatcaccatgagtgacgactgaatccggtgagaatggcaaaagtttatgcatttctttccagacttgttcaacaggccagccattacgctcgtcatcaaaatcactcgcatcaaccaaaccgttattcattcgtgattgcgcctgagcgagacgaaatacgcgatcgctgttaaaaggacaattacaaacaggaatcgaatgcaaccggcgcaggaacactgccagcgcatcaacaatattttcacctgaatcaggatattcttctaatacctggaatgctgtttttccggggatcgcagtggtgagtaaccatgcatcatcaggagtacggataaaatgcttgatggtcggaagaggcataaattccgtcagccagtttagtctgaccatctcatctgtaacatcattggcaacgctacctttgccatgtttcagaaacaactctggcgcatcgggcttcccatacaagcgatagattgtcgcacctgattgcccgacattatcgcgagcccatttatacccatataaatcagcatccatgttggaatttaatcgcggcctcgacgtttcccgttgaatatggctcataacaccccttgtattactgtttatgtaagcagacagttttattgttcatgatgatatatttttatcttgtgcaatgtaacatcagagattttgagacacgggccagagctgcatcgcgcgtttcggtgatgacggtgaaaacctctgacacatgcagctcccggagacggtcacagcttgtctgtaagcggatgccgggagcagacaagcccgtcagggcgcgtcagcgggtgttggcgggtgtcggggctggcttaactatgcggcatcagagcagattgtactgagagtgcaccatatgcggtgtgaaataccgcacagatgcgtaaggagaaaataccgcatcaggcgccattcgccattcaggctgcgcaactgttgggaagggcgatcggtgcgggcctcttcgctattacgccagctggcgaaagggggatgtgctgcaaggcgattaagttgggtaacgccagggttttcccagtcacgacgttgtaaaacgacggccagagaattc

SEQ ID NO: 796 - DNA, 1185 bp, synthetic construct; identical to SEQ ID NO: 771
  source 1..1185: mol_type = other DNA

SEQ ID NO: 797 - DNA, 1185 bp, synthetic construct; identical to SEQ ID NO: 772
  source 1..1185: mol_type = other DNA

SEQ ID NO: 798-856 - skipped (59 entries)

SEQ ID NO: 857 - protein, 1378 aa, synthetic construct
MDKKYSIGLDIGTNSVGWAVITDEYKVPSKKFKVLGNTDRHSIKKNLIGALLFDSGETAEATRLKRTARRRYTRRKNRICYLQEIFSNEMAKVDDSFFHRLEESFLVEEDKKHERHPIFGNIVDEVAYHEKYPTIYHLRKKLVDSTDKADLRLIYLALAHMIKFRGHFLIEGDLNPDNSDVDKLFQLVQTYNQLFEENPINASGVDAKAILSARLSKSRRLENLIAQLPGEKKNGLFGNLIALSLGLTPNFKSNFDLAEDAKLQLSKDTYDDDLDNLLAQIGDQYADLFLAAKNLSDAILLSDILRVNTEITKAPLSASMIKRYDEHHQDLTLLKALVRQQLPEKYKEIFFDQSKNGYAGYIDGGASQEEFYKFIKPILEKMDGTEELLVKLNREDLLRKQRTFDNGSIPHQIHLGELHAILRRQEDFYPFLKDNREKIEKILTFRIPYYVGPLARGNSRFAWMTRKSEETITPWNFEEVVDKGASAQSFIERMTNFDKNLPNEKVLPKHSLLYEYFTVYNELTKVKYVTEGMRKPAFLSGEQKKAIVDLLFKTNRKVTVKQLKEDYFKKIECFDSVEISGVEDRFNASLGTYHDLLKIIKDKDFLDNEENEDILEDIVLTLTLFEDREMIEERLKTYAHLFDDKVMKQLKRRRYTGWGRLSRKLINGIRDKQSGKTILDFLKSDGFANRNFMQLIHDDSLTFKEDIQKAQVSGQGDSLHEHIANLAGSPAIKKGILQTVKVVDELVKVMGRHKPENIVIEMARENQTTQKGQKNSRERMKRIEEGIKELGSQILKEHPVENTQLQNEKLYLYYLQNGRDMYVDQELDINRLSDYDVDHIVPQSFLKDDSIDNKVLTRSDKNRGKSDNVPSEEVVKKMKNYWRQLLNAKLITQRKFDNLTKAERGGLSELDKAGFIKRQLVETRQITKHVAQILDSRMNTKYDENDKLIREVKVITLKSKLVSDFRKDFQFYKVREINNYHHAHDAYLNAVVGTALIKKYPKLESEFVYGDYKVYDVRKMIAKSEQEIGKATAKYFFYSNIMNFFKTEITLANGEIRKRPLIETNGETGEIVWDKGRDFATVRKVLSMPQVNIVKKTEVQTGGFSKESILPKRNSDKLIARKKDWDPKKYGGFDSPTVAYSVLVVAKVEKGKSKKLKSVKELLGITIMERSSFEKNPIDFLEAKGYKEVKKDLIIKLPKYSLFELENGRKRMLASAGELQKGNELALPSKYVNFLYLASHYEKLKGSPEDNEQKQLFVEQHKHYLDEIIEQISEFSKRVILADANLDKVLSAYNKHRDKPIREQAENIIHLFTLTNLGAPAAFKYFDTTIDRKRYTSTKEVLDATLIHQSITGLYETRIDLSQLGGDGGGSPKKKRKV

SEQ ID NO: 858 - DNA, 4140 bp, synthetic construct
  source 1..4140: mol_type = other DNA
atggacaagaagtacagcatcggactggacatcggaacaaacagcgtcggatgggcagtcatcacagacgaatacaaggtcccgagcaagaagttcaaggtcctgggaaacacagacagacacagcatcaagaagaacctgatcggagcactgctgttcgacagcggagaaacagcagaagcaacaagactgaagagaacagcaagaagaagatacacaagaagaaagaacagaatctgctacctgcaggaaatcttcagcaacgaaatggcaaaggtcgacgacagcttcttccacagactggaagaaagcttcctggtcgaagaagacaagaagcacgaaagacacccgatcttcggaaacatcgtcgacgaagtcgcataccacgaaaagtacccgacaatctaccacctgagaaagaagctggtcgacagcacagacaaggcagacctgagactgatctacctggcactggcacacatgatcaagttcagaggacacttcctgatcgaaggagacctgaacccggacaacagcgacgtcgacaagctgttcatccagctggtccagacatacaaccagctgttcgaagaaaacccgatcaacgcaagcggagtcgacgcaaaggcaatcctgagcgcaagactgagcaagagcagaagactggaaaacctgatcgcacagctgccgggagaaaagaagaacggactgttcggaaacctgatcgcactgagcctgggactgacaccgaacttcaagagcaacttcgacctggcagaagacgcaaagctgcagctgagcaaggacacatacgacgacgacctggacaacctgctggcacagatcggagaccagtacgcagacctgttcctggcagcaaagaacctgagcgacgcaatcctgctgagcgacatcctgagagtcaacacagaaatcacaaaggcaccgctgagcgcaagcatgatcaagagatacgacgaacaccaccaggacctgacactgctgaaggcactggtcagacagcagctgccggaaaagtacaaggaaatcttcttcgaccagagcaagaacggatacgcaggatacatcgacggaggagcaagccaggaagaattctacaagttcatcaagccgatcctggaaaagatggacggaacagaagaactgctggtcaagctgaacagagaagacctgctgagaaagcagagaacattcgacaacggaagcatcccgcaccagatccacctgggagaactgcacgcaatcctgagaagacaggaagacttctacccgttcctgaaggacaacagagaaaagatcgaaaagatcctgacattcagaatcccgtactacgtcggaccgctggcaagaggaaacagcagattcgcatggatgacaagaaagagcgaagaaacaatcacaccgtggaacttcgaagaagtcgtcgacaagggagcaagcgcacagagcttcatcgaaagaatgacaaacttcgacaagaacctgccgaacgaaaaggtcctgccgaagcacagcctgctgtacgaatacttcacagtctacaacgaactgacaaaggtcaagtacgtcacagaaggaatgagaaagccggcattcctgagcggagaacagaagaaggcaatcgtcgacctgctgttcaagacaaacagaaaggtcacagtcaagcagctgaaggaagactacttcaagaagatcgaatgcttcgacagcgtcgaaatcagcggagtcgaagacagattcaacgcaagcctgggaacataccacgacctgctgaagatcatcaaggacaaggacttcctggacaacgaagaaaacgaagacatcctggaagacatcgtcctgacactgacactgttcgaagacagagaaatgatcgaagaaagactgaagacatacgcacacctgttcgacgacaaggtcatgaagcagctgaagagaagaagatacacaggatggggaagactgagcagaaagctgatcaacggaatcagagacaagcagagcggaaagacaatcctggacttcctgaagagcgacggattcgcaaacagaaacttcatgcagctgatccacgacgacagcctgacattcaaggaagacatccagaaggcacaggtcagcggacagggagacagcctgcacgaacacatcgcaaacctggcaggaagcccggcaatcaagaagggaatcctgcagacagtcaaggtcgtcgacgaactggtcaaggtcatgggaagacacaagccggaaaacatcgtcatcgaaatggcaagagaaaaccagacaacacagaagggacagaagaacagcagagaaagaatgaagagaatcgaagaaggaatcaaggaactgggaagccagatcctgaaggaacacccggtcgaaaacacacagctgcagaacgaaaagctgtacctgtactacctgcagaacggaagagacatgtacgtcgaccaggaactggacatcaacagactgagcgactacgacgtcgaccacatcgtcccgcagagcttcctgaaggacgacagcatcgacaacaaggtcctgacaagaagcgacaagaacagaggaaagagcgacaacgtcccgagcgaagaagtcgtcaagaagatgaagaactactggagacagctgctgaacgcaaagctgatcacacagagaaagttcgacaacctgacaaaggcagagagaggaggactgagcgaactggacaaggcaggattcatcaagagacagctggtcgaaacaagacagatcacaaagcacgtcgcacagatcctggacagcagaatgaacacaaagtacgacgaaaacgacaagctgatcagagaagtcaaggtcatcacactgaagagcaagctggtcagcgacttcagaaaggacttccagttctacaaggtcagagaaatcaacaactaccaccacgcacacgacgcatacctgaacgcagtcgtcggaacagcactgatcaagaagtacccgaagctggaaagcgaattcgtctacggagactacaaggtctacgacgtcagaaagatgatcgcaaagagcgaacaggaaatcggaaaggcaacagcaaagtacttcttctacagcaacatcatgaacttcttcaagacagaaatcacactggcaaacggagaaatcagaaagagaccgctgatcgaaacaaacggagaaacaggagaaatcgtctgggacaagggaagagacttcgcaacagtcagaaaggtcctgagcatgccgcaggtcaacatcgtcaagaagacagaagtccagacaggaggattcagcaaggaaagcatcctgccgaagagaaacagcgacaagctgatcgcaagaaagaaggactgggacccgaagaagtacggaggattcgacagcccgacagtcgcatacagcgtcctggtcgtcgcaaaggtcgaaaagggaaagagcaagaagctgaagagcgtcaaggaactgctgggaatcacaatcatggaaagaagcagcttcgaaaagaacccgatcgacttcctggaagcaaagggatacaaggaagtcaagaaggacctgatcatcaagctgccgaagtacagcctgttcgaactggaaaacggaagaaagagaatgctggcaagcgcaggagaactgcagaagggaaacgaactggcactgccgagcaagtacgtcaacttcctgtacctggcaagccactacgaaaagctgaagggaagcccggaagacaacgaacagaagcagctgttcgtcgaacagcacaagcactacctggacgaaatcatcgaacagatcagcgaattcagcaagagagtcatcctggcagacgcaaacctggacaaggtcctgagcgcatacaacaagcacagagacaagccgatcagagaacaggcagaaaacatcatccacctgttcacactgacaaacctgggagcaccggcagcattcaagtacttcgacacaacaatcgacagaaagagatacacaagcacaaaggaagtcctggacgcaacactgatccaccagagcatcacaggactgtacgaaacaagaatcgacctgagccagctgggaggagacggaggaggaagcccgaagaagaagagaaaggtctag

SEQ ID NO: 859 - DNA, 4140 bp, synthetic construct
  source 1..4140: mol_type = other DNA
atggacaagaagtactccatcggcctggacatcggcaccaactccgtgggctgggccgtgatcaccgacgagtacaaggtgccctccaagaagttcaaggtgctgggcaacaccgaccggcactccatcaagaagaacctgatcggcgccctgctgttcgactccggcgagaccgccgaggccacccggctgaagcggaccgcccggcggcggtacacccggcggaagaaccggatctgctacctgcaggagatcttctccaacgagatggccaaggtggacgactccttcttccaccggctggaggagtccttcctggtggaggaggacaagaagcacgagcggcaccccatcttcggcaacatcgtggacgaggtggcctaccacgagaagtaccccaccatctaccacctgcggaagaagctggtggactccaccgacaaggccgacctgcggctgatctacctggccctggcccacatgatcaagttccggggccacttcctgatcgagggcgacctgaaccccgacaactccgacgtggacaagctgttcatccagctggtgcagacctacaaccagctgttcgaggagaaccccatcaacgcctccggcgtggacgccaaggccatcctgtccgcccggctgtccaagtcccggcggctggagaacctgatcgcccagctgcccggcgagaagaagaacggcctgttcggcaacctgatcgccctgtccctgggcctgacccccaacttcaagtccaacttcgacctggccgaggacgccaagctgcagctgtccaaggacacctacgacgacgacctggacaacctgctggcccagatcggcgaccagtacgccgacctgttcctggccgccaagaacctgtccgacgccatcctgctgtccgacatcctgcgggtgaacaccgagatcaccaaggcccccctgtccgcctccatgatcaagcggtacgacgagcaccaccaggacctgaccctgctgaaggccctggtgcggcagcagctgcccgagaagtacaaggagatcttcttcgaccagtccaagaacggctacgccggctacatcgacggcggcgcctcccaggaggagttctacaagttcatcaagcccatcctggagaagatggacggcaccgaggagctgctggtgaagctgaaccgggaggacctgctgcggaagcagcggaccttcgacaacggctccatcccccaccagatccacctgggcgagctgcacgccatcctgcggcggcaggaggacttctaccccttcctgaaggacaaccgggagaagatcgagaagatcctgaccttccggatcccctactacgtgggccccctggcccggggcaactcccggttcgcctggatgacccggaagtccgaggagaccatcaccccctggaacttcgaggaggtggtggacaagggcgcctccgcccagtccttcatcgagcggatgaccaacttcgacaagaacctgcccaacgagaaggtgctgcccaagcactccctgctgtacgagtacttcaccgtgtacaacgagctgaccaaggtgaagtacgtgaccgagggcatgcggaagcccgccttcctgtccggcgagcagaagaaggccatcgtggacctgctgttcaagaccaaccggaaggtgaccgtgaagcagctgaaggaggactacttcaagaagatcgagtgcttcgactccgtggagatctccggcgtggaggaccggttcaacgcctccctgggcacctaccacgacctgctgaagatcatcaaggacaaggacttcctggacaacgaggagaacgaggacatcctggaggacatcgtgctgaccctgaccctgttcgaggaccgggagatgatcgaggagcggctgaagacctacgcccacctgttcgacgacaaggtgatgaagcagctgaagcggcggcggtacaccggctggggccggctgtcccggaagctgatcaacggcatccgggacaagcagtccggcaagaccatcctggacttcctgaagtccgacggcttcgccaaccggaacttcatgcagctgatccacgacgactccctgaccttcaaggaggacatccagaaggcccaggtgtccggccagggcgactccctgcacgagcacatcgccaacctggccggctcccccgccatcaagaagggcatcctgcagaccgtgaaggtggtggacgagctggtgaaggtgatgggccggcacaagcccgagaacatcgtgatcgagatggcccgggagaaccagaccacccagaagggccagaagaactcccgggagcggatgaagcggatcgaggagggcatcaaggagctgggctcccagatcctgaaggagcaccccgtggagaacacccagctgcagaacgagaagctgtacctgtactacctgcagaacggccgggacatgtacgtggaccaggagctggacatcaaccggctgtccgactacgacgtggaccacatcgtgccccagtccttcctgaaggacgactccatcgacaacaaggtgctgacccggtccgacaagaaccggggcaagtccgacaacgtgccctccgaggaggtggtgaagaagatgaagaactactggcggcagctgctgaacgccaagctgatcacccagcggaagttcgacaacctgaccaaggccgagcggggcggcctgtccgagctggacaaggccggcttcatcaagcggcagctggtggagacccggcagatcaccaagcacgtggcccagatcctggactcccggatgaacaccaagtacgacgagaacgacaagctgatccgggaggtgaaggtgatcaccctgaagtccaagctggtgtccgacttccggaaggacttccagttctacaaggtgcgggagatcaacaactaccaccacgcccacgacgcctacctgaacgccgtggtgggcaccgccctgatcaagaagtaccccaagctggagtccgagttcgtgtacggcgactacaaggtgtacgacgtgcggaagatgatcgccaagtccgagcaggagatcggcaaggccaccgccaagtacttcttctactccaacatcatgaacttcttcaagaccgagatcaccctggccaacggcgagatccggaagcggcccctgatcgagaccaacggcgagaccggcgagatcgtgtgggacaagggccgggacttcgccaccgtgcggaaggtgctgtccatgccccaggtgaacatcgtgaagaagaccgaggtgcagaccggcggcttctccaaggagtccatcctgcccaagcggaactccgacaagctgatcgcccggaagaaggactgggaccccaagaagtacggcggcttcgactcccccaccgtggcctactccgtgctggtggtggccaaggtggagaagggcaagtccaagaagctgaagtccgtgaaggagctgctgggcatcaccatcatggagcggtcctccttcgagaagaaccccatcgacttcctggaggccaagggctacaaggaggtgaagaaggacctgatcatcaagctgcccaagtactccctgttcgagctggagaacggccggaagcggatgctggcctccgccggcgagctgcagaagggcaacgagctggccctgccctccaagtacgtgaacttcctgtacctggcctcccactacgagaagctgaagggctcccccgaggacaacgagcagaagcagctgttcgtggagcagcacaagcactacctggacgagatcatcgagcagatctccgagttctccaagcgggtgatcctggccgacgccaacctggacaaggtgctgtccgcctacaacaagcaccgggacaagcccatccgggagcaggccgagaacatcatccacctgttcaccctgaccaacctgggcgcccccgccgccttcaagtacttcgacaccaccatcgaccggaagcggtacacctccaccaaggaggtgctggacgccaccctgatccaccagtccatcaccggcctgtacgagacccggatcgacctgtcccagctgggcggcgacggcggcggctcccccaagaagaagcggaaggtgtga

SEQ ID NO: 860 - RNA, 4140 nt, synthetic construct
  source 1..4140: mol_type = other RNA
atggacaagaagtacagcatcggcctggacatcggcacgaacagcgttggctgggctgtgatcacggacgagtacaaggttccctcaaagaagttcaaggtgctgggcaacacggaccggcacagcatcaagaagaatctcatcggtgcactgctgttcgacagcggtgagacggccgaagccacgcggctgaagcggacggcccgccggcggtacacgcggcggaagaaccggatctgctacctgcaggagatcttcagcaacgagatggccaaggtggacgacagcttcttccaccggctggaggagagcttcctggtggaggaggacaagaagcacgagcggcaccccatcttcggcaacatcgtggacgaagtcgcctaccacgagaagtaccccaccatctaccacctgcggaagaagctggtggactcgactgacaaggccgacctgcggctgatctacctggcactggcccacatgataaagttccggggccacttcctgatcgagggcgacctgaaccctgacaacagcgacgtggacaagctgttcatccagctggtgcagacctacaaccagctgttcgaggagaaccccatcaacgccagcggcgtggacgccaaggccatcctcagcgcccgcctcagcaagagccggcggctggagaatctcatcgcccagcttccaggtgagaagaagaatgggctgttcggcaatctcatcgcactcagcctgggcctgactcccaacttcaagagcaacttcgacctggccgaggacgccaagctgcagctcagcaaggacacctacgacgacgacctggacaatctcctggcccagatcggcgaccagtacgccgacctgttcctggctgccaagaatctcagcgacgccatcctgctcagcgacatcctgcgggtgaacacagagatcacgaaggcccccctcagcgccagcatgataaagcggtacgacgagcaccaccaggacctgacgctgctgaaggcactggtgcggcagcagcttccagagaagtacaaggagatcttcttcgaccagagcaagaatgggtacgccgggtacatcgacggtggtgccagccaggaggagttctacaagttcatcaagcccatcctggagaagatggacggcacagaggagctgctggtgaagctgaacagggaggacctgctgcggaagcagcggacgttcgacaatgggagcatcccccaccagatccacctgggtgagctgcacgccatcctgcggcggcaggaggacttctaccccttcctgaaggacaacagggagaagatcgagaagatcctgacgttccggatcccctactacgttggccccctggcccgcggcaacagccggttcgcctggatgacgcggaagagcgaggagacgatcactccctggaacttcgaggaagtcgtggacaagggtgccagcgcccagagcttcatcgagcggatgacgaacttcgacaagaatcttccaaacgagaaggtgcttccaaagcacagcctgctgtacgagtacttcacggtgtacaacgagctgacgaaggtgaagtacgtgacagagggcatgcggaagcccgccttcctcagcggtgagcagaagaaggccatcgtggacctgctgttcaagacgaaccggaaggtgacggtgaagcagctgaaggaggactacttcaagaagatcgagtgcttcgacagcgtggagatcagcggcgtggaggaccggttcaacgccagcctgggcacctaccacgacctgctgaagatcatcaaggacaaggacttcctggacaacgaggagaacgaggacatcctggaggacatcgtgctgacgctgacgctgttcgaggacagggagatgatagaggagcggctgaagacctacgcccacctgttcgacgacaaggtgatgaagcagctgaagcggcggcggtacacgggctggggccggctcagccggaagctgatcaatgggatccgagacaagcagagcggcaagacgatcctggacttcctgaagagcgacggcttcgccaaccggaacttcatgcagctgatccacgacgacagcctgacgttcaaggaggacatccagaaggcccaggtcagcggccagggcgacagcctgcacgagcacatcgccaatctcgccgggagccccgccatcaagaaggggatcctgcagacggtgaaggtggtggacgagctggtgaaggtgatgggccggcacaagccagagaacatcgtgatcgagatggccagggagaaccagacgactcaaaaggggcagaagaacagcagggagcggatgaagcggatcgaggagggcatcaaggagctgggcagccagatcctgaaggagcaccccgtggagaacactcaactgcagaacgagaagctgtacctgtactacctgcagaatgggcgagacatgtacgtggaccaggagctggacatcaaccggctcagcgactacgacgtggaccacatcgttccccagagcttcctgaaggacgacagcatcgacaacaaggtgctgacgcggagcgacaagaaccggggcaagagcgacaacgttccctcagaggaagtcgtgaagaagatgaagaactactggcggcagctgctgaacgccaagctgatcactcaacggaagttcgacaatctcacgaaggccgagcggggtggcctcagcgagctggacaaggccgggttcatcaagcggcagctggtggagacgcggcagatcacgaagcacgtggcccagatcctggacagccggatgaacacgaagtacgacgagaacgacaagctgatcagggaagtcaaggtgatcacgctgaagagcaagctggtcagcgacttccggaaggacttccagttctacaaggtgagggagatcaacaactaccaccacgcccacgacgcctacctgaacgctgtggttggcacggcactgatcaagaagtaccccaagctggagagcgagttcgtgtacggcgactacaaggtgtacgacgtgcggaagatgatagccaagagcgagcaggagatcggcaaggccacggccaagtacttcttctacagcaacatcatgaacttcttcaagacagagatcacgctggccaatggtgagatccggaagcggcccctgatcgagacgaatggtgagacgggtgagatcgtgtgggacaaggggcgagacttcgccacggtgcggaaggtgctcagcatgccccaggtgaacatcgtgaagaagacagaagtccagacgggtggcttcagcaaggagagcatccttccaaagcggaacagcgacaagctgatcgcccgcaagaaggactgggaccccaagaagtacggtggcttcgacagccccaccgtggcctacagcgtgctggtggtggccaaggtggagaaggggaagagcaagaagctgaagagcgtgaaggagctgctgggcatcacgatcatggagcggagcagcttcgagaagaaccccatcgacttcctggaagccaaggggtacaaggaagtcaagaaggacctgatcatcaagcttccaaagtacagcctgttcgagctggagaatgggcggaagcggatgctggccagcgccggtgagctgcagaaggggaacgagctggcacttccctcaaagtacgtgaacttcctgtacctggccagccactacgagaagctgaaggggagcccagaggacaacgagcagaagcagctgttcgtggagcagcacaagcactacctggacgagatcatcgagcagatcagcgagttcagcaagcgggtgatcctggccgacgccaatctcgacaaggtgctcagcgcctacaacaagcaccgagacaagcccatcagggagcaggccgagaacatcatccacctgttcacgctgacgaatctcggtgcccccgctgccttcaagtacttcgacacgacgatcgaccggaagcggtacacgtcgactaaggaagtcctggacgccacgctgatccaccagagcatcacgggcctgtacgagacgcggatcgacctcagccagctgggtggcgacggtggtggcagccccaagaagaagcggaaggtgtag

SEQ ID NO: 861 - RNA, 4140 nt, synthetic construct
  source 1..4140: mol_type = other RNA
atggacaagaagtacagcatcggcctcgacatcggcaccaacagcgtcggctgggccgtcatcaccgacgagtacaaggtccccagcaagaagttcaaggtcctcggcaacaccgaccgccacagcatcaagaagaacctcatcggcgccctcctcttcgacagcggcgagaccgccgaggccacccgcctcaagcgcaccgcccgccgccgctacacccgccgcaagaaccgcatctgctacctccaggagatcttcagcaacgagatggccaaggtcgacgacagcttcttccaccgcctcgaggagagcttcctcgtcgaggaggacaagaagcacgagcgccaccccatcttcggcaacatcgtcgacgaggtcgcctaccacgagaagtaccccaccatctaccacctccgcaagaagctcgtcgacagcaccgacaaggccgacctccgcctcatctacctcgccctcgcccacatgatcaagttccgcggccacttcctcatcgagggcgacctcaaccccgacaacagcgacgtcgacaagctcttcatccagctcgtccagacctacaaccagctcttcgaggagaaccccatcaacgccagcggcgtcgacgccaaggccatcctcagcgcccgcctcagcaagagccgccgcctcgagaacctcatcgcccagctccccggcgagaagaagaacggcctcttcggcaacctcatcgccctcagcctcggcctcacccccaacttcaagagcaacttcgacctcgccgaggacgccaagctccagctcagcaaggacacctacgacgacgacctcgacaacctcctcgcccagatcggcgaccagtacgccgacctcttcctcgccgccaagaacctcagcgacgccatcctcctcagcgacatcctccgcgtcaacaccgagatcaccaaggcccccctcagcgccagcatgatcaagcgctacgacgagcaccaccaggacctcaccctcctcaaggccctcgtccgccagcagctccccgagaagtacaaggagatcttcttcgaccagagcaagaacggctacgccggctacatcgacggcggcgccagccaggaggagttctacaagttcatcaagcccatcctcgagaagatggacggcaccgaggagctcctcgtcaagctcaaccgcgaggacctcctccgcaagcagcgcaccttcgacaacggcagcatcccccaccagatccacctcggcgagctccacgccatcctccgccgccaggaggacttctaccccttcctcaaggacaaccgcgagaagatcgagaagatcctcaccttccgcatcccctactacgtcggccccctcgcccgcggcaacagccgcttcgcctggatgacccgcaagagcgaggagaccatcaccccctggaacttcgaggaggtcgtcgacaagggcgccagcgcccagagcttcatcgagcgcatgaccaacttcgacaagaacctccccaacgagaaggtcctccccaagcacagcctcctctacgagtacttcaccgtctacaacgagctcaccaaggtcaagtacgtcaccgagggcatgcgcaagcccgccttcctcagcggcgagcagaagaaggccatcgtcgacctcctcttcaagaccaaccgcaaggtcaccgtcaagcagctcaaggaggactacttcaagaagatcgagtgcttcgacagcgtcgagatcagcggcgtcgaggaccgcttcaacgccagcctcggcacctaccacgacctcctcaagatcatcaaggacaaggacttcctcgacaacgaggagaacgaggacatcctcgaggacatcgtcctcaccctcaccctcttcgaggaccgcgagatgatcgaggagcgcctcaagacctacgcccacctcttcgacgacaaggtcatgaagcagctcaagcgccgccgctacaccggctggggccgcctcagccgcaagctcatcaacggcatccgcgacaagcagagcggcaagaccatcctcgacttcctcaagagcgacggcttcgccaaccgcaacttcatgcagctcatccacgacgacagcctcaccttcaaggaggacatccagaaggcccaggtcagcggccagggcgacagcctccacgagcacatcgccaacctcgccggcagccccgccatcaagaagggcatcctccagaccgtcaaggtcgtcgacgagctcgtcaaggtcatgggccgccacaagcccgagaacatcgtcatcgagatggcccgcgagaaccagaccacccagaagggccagaagaacagccgcgagcgcatgaagcgcatcgaggagggcatcaaggagctcggcagccagatcctcaaggagcaccccgtcgagaacacccagctccagaacgagaagctctacctctactacctccagaacggccgcgacatgtacgtcgaccaggagctcgacatcaaccgcctcagcgactacgacgtcgaccacatcgtcccccagagcttcctcaaggacgacagcatcgacaacaaggtcctcacccgcagcgacaagaaccgcggcaagagcgacaacgtccccagcgaggaggtcgtcaagaagatgaagaactactggcgccagctcctcaacgccaagctcatcacccagcgcaagttcgacaacctcaccaaggccgagcgcggcggcctcagcgagctcgacaaggccggcttcatcaagcgccagctcgtcgagacccgccagatcaccaagcacgtcgcccagatcctcgacagccgcatgaacaccaagtacgacgagaacgacaagctcatccgcgaggtcaaggtcatcaccctcaagagcaagctcgtcagcgacttccgcaaggacttccagttctacaaggtccgcgagatcaacaactaccaccacgcccacgacgcctacctcaacgccgtcgtcggcaccgccctcatcaagaagtaccccaagctcgagagcgagttcgtctacggcgactacaaggtctacgacgtccgcaagatgatcgccaagagcgagcaggagatcggcaaggccaccgccaagtacttcttctacagcaacatcatgaacttcttcaagaccgagatcaccctcgccaacggcgagatccgcaagcgccccctcatcgagaccaacggcgagaccggcgagatcgtctgggacaagggccgcgacttcgccaccgtccgcaaggtcctcagcatgccccaggtcaacatcgtcaagaagaccgaggtccagaccggcggcttcagcaaggagagcatcctccccaagcgcaacagcgacaagctcatcgcccgcaagaaggactgggaccccaagaagtacggcggcttcgacagccccaccgtcgcctacagcgtcctcgtcgtcgccaaggtcgagaagggcaagagcaagaagctcaagagcgtcaaggagctcctcggcatcaccatcatggagcgcagcagcttcgagaagaaccccatcgacttcctcgaggccaagggctacaaggaggtcaagaaggacctcatcatcaagctccccaagtacagcctcttcgagctcgagaacggccgcaagcgcatgctcgccagcgccggcgagctccagaagggcaacgagctcgccctccccagcaagtacgtcaacttcctctacctcgccagccactacgagaagctcaagggcagccccgaggacaacgagcagaagcagctcttcgtcgagcagcacaagcactacctcgacgagatcatcgagcagatcagcgagttcagcaagcgcgtcatcctcgccgacgccaacctcgacaaggtcctcagcgcctacaacaagcaccgcgacaagcccatccgcgagcaggccgagaacatcatccacctcttcaccctcaccaacctcggcgcccccgccgccttcaagtacttcgacaccaccatcgaccgcaagcgctacaccagcaccaaggaggtcctcgacgccaccctcatccaccagagcatcaccggcctctacgagacccgcatcgacctcagccagctcggcggcgacggcggcggcagccccaagaagaagcgcaaggtctag

SEQ ID NO: 862 - RNA, 4197 nt, synthetic construct
  source 1..4197: mol_type = other RNA
atggacaagaagtactccatcggcctggacatcggcaccaactccgtgggctgggccgtgatcaccgacgagtacaaggtgccctccaagaagttcaaggtgctgggcaacaccgaccggcactccatcaagaagaacctgatcggcgccctgctgttcgactccggcgagaccgccgaggccacccggctgaagcggaccgcccggcggcggtacacccggcggaagaaccggatctgctacctgcaggagatcttctccaacgagatggccaaggtggacgactccttcttccaccggctggaggagtccttcctggtggaggaggacaagaagcacgagcggcaccccatcttcggcaacatcgtggacgaggtggcctaccacgagaagtaccccaccatctaccacctgcggaagaagctggtggactccaccgacaaggccgacctgcggctgatctacctggccctggcccacatgatcaagttccggggccacttcctgatcgagggcgacctgaaccccgacaactccgacgtggacaagctgttcatccagctggtgcagacctacaaccagctgttcgaggagaaccccatcaacgcctccggcgtggacgccaaggccatcctgtccgcccggctgtccaagtcccggcggctggagaacctgatcgcccagctgcccggcgagaagaagaacggcctgttcggcaacctgatcgccctgtccctgggcctgacccccaacttcaagtccaacttcgacctggccgaggacgccaagctgcagctgtccaaggacacctacgacgacgacctggacaacctgctggcccagatcggcgaccagtacgccgacctgttcctggccgccaagaacctgtccgacgccatcctgctgtccgacatcctgcgggtgaacaccgagatcaccaaggcccccctgtccgcctccatgatcaagcggtacgacgagcaccaccaggacctgaccctgctgaaggccctggtgcggcagcagctgcccgagaagtacaaggagatcttcttcgaccagtccaagaacggctacgccggctacatcgacggcggcgcctcccaggaggagttctacaagttcatcaagcccatcctggagaagatggacggcaccgaggagctgctggtgaagctgaaccgggaggacctgctgcggaagcagcggaccttcgacaacggctccatcccccaccagatccacctgggcgagctgcacgccatcctgcggcggcaggaggacttctaccccttcctgaaggacaaccgggagaagatcgagaagatcctgaccttccggatcccctactacgtgggccccctggcccggggcaactcccggttcgcctggatgacccggaagtccgaggagaccatcaccccctggaacttcgaggaggtggtggacaagggcgcctccgcccagtccttcatcgagcggatgaccaacttcgacaagaacctgcccaacgagaaggtgctgcccaagcactccctgctgtacgagtacttcaccgtgtacaacgagctgaccaaggtgaagtacgtgaccgagggcatgcggaagcccgccttcctgtccggcgagcagaagaaggccatcgtggacctgctgttcaagaccaaccggaaggtgaccgtgaagcagctgaaggaggactacttcaagaagatcgagtgcttcgactccgtggagatctccggcgtggaggaccggttcaacgcctccctgggcacctaccacgacctgctgaagatcatcaaggacaaggacttcctggacaacgaggagaacgaggacatcctggaggacatcgtgctgaccctgaccctgttcgaggaccgggagatgatcgaggagcggctgaagacctacgcccacctgttcgacgacaaggtgatgaagcagctgaagcggcggcggtacaccggctggggccggctgtcccggaagctgatcaacggcatccgggacaagcagtccggcaagaccatcctggacttcctgaagtccgacggcttcgccaaccggaacttcatgcagctgatccacgacgactccctgaccttcaaggaggacatccagaaggcccaggtgtccggccagggcgactccctgcacgagcacatcgccaacctggccggctcccccgccatcaagaagggcatcctgcagaccgtgaaggtggtggacgagctggtgaaggtgatgggccggcacaagcccgagaacatcgtgatcgagatggcccgggagaaccagaccacccagaagggccagaagaactcccgggagcggatgaagcggatcgaggagggcatcaaggagctgggctcccagatcctgaaggagcaccccgtggagaacacccagctgcagaacgagaagctgtacctgtactacctgcagaacggccgggacatgtacgtggaccaggagctggacatcaaccggctgtccgactacgacgtggaccacatcgtgccccagtccttcctgaaggacgactccatcgacaacaaggtgctgacccggtccgacaagaaccggggcaagtccgacaacgtgccctccgaggaggtggtgaagaagatgaagaactactggcggcagctgctgaacgccaagctgatcacccagcggaagttcgacaacctgaccaaggccgagcggggcggcctgtccgagctggacaaggccggcttcatcaagcggcagctggtggagacccggcagatcaccaagcacgtggcccagatcctggactcccggatgaacaccaagtacgacgagaacgacaagctgatccgggaggtgaaggtgatcaccctgaagtccaagctggtgtccgacttccggaaggacttccagttctacaaggtgcgggagatcaacaactaccaccacgcccacgacgcctacctgaacgccgtggtgggcaccgccctgatcaagaagtaccccaagctggagtccgagttcgtgtacggcgactacaaggtgtacgacgtgcggaagatgatcgccaagtccgagcaggagatcggcaaggccaccgccaagtacttcttctactccaacatcatgaacttcttcaagaccgagatcaccctggccaacggcgagatccggaagcggcccctgatcgagaccaacggcgagaccggcgagatcgtgtgggacaagggccgggacttcgccaccgtgcggaaggtgctgtccatgccccaggtgaacatcgtgaagaagaccgaggtgcagaccggcggcttctccaaggagtccatcctgcccaagcggaactccgacaagctgatcgcccggaagaaggactgggaccccaagaagtacggcggcttcgactcccccaccgtggcctactccgtgctggtggtggccaaggtggagaagggcaagtccaagaagctgaagtccgtgaaggagctgctgggcatcaccatcatggagcggtcctccttcgagaagaaccccatcgacttcctggaggccaagggctacaaggaggtgaagaaggacctgatcatcaagctgcccaagtactccctgttcgagctggagaacggccggaagcggatgctggcctccgccggcgagctgcagaagggcaacgagctggccctgccctccaagtacgtgaacttcctgtacctggcctcccactacgagaagctgaagggctcccccgaggacaacgagcagaagcagctgttcgtggagcagcacaagcactacctggacgagatcatcgagcagatctccgagttctccaagcgggtgatcctggccgacgccaacctggacaaggtgctgtccgcctacaacaagcaccgggacaagcccatccgggagcaggccgagaacatcatccacctgttcaccctgaccaacctgggcgcccccgccgccttcaagtacttcgacaccaccatcgaccggaagcggtacacctccaccaaggaggtgctggacgccaccctgatccaccagtccatcaccggcctgtacgagacccggatcgacctgtcccagctgggcggcgacggcggcggctcccccaagaagaagcggaaggtgtccgagtccgccacccccgagtccgtgtccggctggcggctgttcaagaagatctcctga

SEQ ID NO: 863 - protein, 1379 aa, synthetic construct
MDKKYSIGLDIGTNSVGWAVITDEYKVPSKKFKVLGNTDRHSIKKNLIGALLFDSGETAEATRLKRTARRRYTRRKNRICYLQEIFSNEMAKVDDSFFHRLEESFLVEEDKKHERHPIFGNIVDEVAYHEKYPTIYHLRKKLVDSTDKADLRLIYLALAHMIKFRGHFLIEGDLNPDNSDVDKLFIQLVQTYNQLFEENPINASGVDAKAILSARLSKSRRLENLIAQLPGEKKNGLFGNLIALSLGLTPNFKSNFDLAEDAKLQLSKDTYDDDLDNLLAQIGDQYADLFLAAKNLSDAILLSDILRVNTEITKAPLSASMIKRYDEHHQDLTLLKALVRQQLPEKYKEIFFDQSKNGYAGYIDGGASQEEFYKFIKPILEKMDGTEELLVKLNREDLLRKQRTFDNGSIPHQIHLGELHAILRRQEDFYPFLKDNREKIEKILTFRIPYYVGPLARGNSRFAWMTRKSEETITPWNFEEVVDKGASAQSFIERMTNFDKNLPNEKVLPKHSLLYEYFTVYNELTKVKYVTEGMRKPAFLSGEQKKAIVDLLFKTNRKVTVKQLKEDYFKKIECFDSVEISGVEDRFNASLGTYHDLLKIIKDKDFLDNEENEDILEDIVLTLTLFEDREMIEERLKTYAHLFDDKVMKQLKRRRYTGWGRLSRKLINGIRDKQSGKTILDFLKSDGFANRNFMQLIHDDSLTFKEDIQKAQVSGQGDSLHEHIANLAGSPAIKKGILQTVKVVDELVKVMGRHKPENIVIEMARENQTTQKGQKNSRERMKRIEEGIKELGSQILKEHPVENTQLQNEKLYLYYLQNGRDMYVDQELDINRLSDYDVDHIVPQSFLKDDSIDNKVLTRSDKNRGKSDNVPSEEVVKKMKNYWRQLLNAKLITQRKFDNLTKAERGGLSELDKAGFIKRQLVETRQITKHVAQILDSRMNTKYDENDKLIREVKVITLKSKLVSDFRKDFQFYKVREINNYHHAHDAYLNAVVGTALIKKYPKLESEFVYGDYKVYDVRKMIAKSEQEIGKATAKYFFYSNIMNFFKTEITLANGEIRKRPLIETNGETGEIVWDKGRDFATVRKVLSMPQVNIVKKTEVQTGGFSKESILPKRNSDKLIARKKDWDPKKYGGFDSPTVAYSVLVVAKVEKGKSKKLKSVKELLGITIMERSSFEKNPIDFLEAKGYKEVKKDLIIKLPKYSLFELENGRKRMLASAGELQKGNELALPSKYVNFLYLASHYEKLKGSPEDNEQKQLFVEQHKHYLDEIIEQISEFSKRVILADANLDKVLSAYNKHRDKPIREQAENIIHLFTLTNLGAPAAFKYFDTTIDRKRYTSTKEVLDATLIHQSITGLYETRIDLSQLGGDGGGSPKKKRKV

SEQ ID NO: 864 - protein, 1398 aa, synthetic construct
MDKKYSIGLDIGTNSVGWAVITDEYKVPSKKFKVLGNTDRHSIKKNLIGALLFDSGETAEATRLKRTARRRYTRRKNRICYLQEIFSNEMAKVDDSFFHRLEESFLVEEDKKHERHPIFGNIVDEVAYHEKYPTIYHLRKKLVDSTDKADLRLIYLALAHMIKFRGHFLIEGDLNPDNSDVDKLFIQLVQTYNQLFEENPINASGVDAKAILSARLSKSRRLENLIAQLPGEKKNGLFGNLIALSLGLTPNFKSNFDLAEDAKLQLSKDTYDDDLDNLLAQIGDQYADLFLAAKNLSDAILLSDILRVNTEITKAPLSASMIKRYDEHHQDLTLLKALVRQQLPEKYKEIFFDQSKNGYAGYIDGGASQEEFYKFIKPILEKMDGTEELLVKLNREDLLRKQRTFDNGSIPHQIHLGELHAILRRQEDFYPFLKDNREKIEKILTFRIPYYVGPLARGNSRFAWMTRKSEETITPWNFEEVVDKGASAQSFIERMTNFDKNLPNEKVLPKHSLLYEYFTVYNELTKVKYVTEGMRKPAFLSGEQKKAIVDLLFKTNRKVTVKQLKEDYFKKIECFDSVEISGVEDRFNASLGTYHDLLKIIKDKDFLDNEENEDILEDIVLTLTLFEDREMIEERLKTYAHLFDDKVMKQLKRRRYTGWGRLSRKLINGIRDKQSGKTILDFLKSDGFANRNFMQLIHDDSLTFKEDIQKAQVSGQGDSLHEHIANLAGSPAIKKGILQTVKVVDELVKVMGRHKPENIVIEMARENQTTQKGQKNSRERMKRIEEGIKELGSQILKEHPVENTQLQNEKLYLYYLQNGRDMYVDQELDINRLSDYDVDHIVPQSFLKDDSIDNKVLTRSDKNRGKSDNVPSEEVVKKMKNYWRQLLNAKLITQRKFDNLTKAERGGLSELDKAGFIKRQLVETRQITKHVAQILDSRMNTKYDENDKLIREVKVITLKSKLVSDFRKDFQFYKVREINNYHHAHDAYLNAVVGTALIKKYPKLESEFVYGDYKVYDVRKMIAKSEQEIGKATAKYFFYSNIMNFFKTEITLANGEIRKRPLIETNGETGEIVWDKGRDFATVRKVLSMPQVNIVKKTEVQTGGFSKESILPKRNSDKLIARKKDWDPKKYGGFDSPTVAYSVLVVAKVEKGKSKKLKSVKELLGITIMERSSFEKNPIDFLEAKGYKEVKKDLIIKLPKYSLFELENGRKRMLASAGELQKGNELALPSKYVNFLYLASHYEKLKGSPEDNEQKQLFVEQHKHYLDEIIEQISEFSKRVILADANLDKVLSAYNKHRDKPIREQAENIIHLFTLTNLGAPAAFKYFDTTIDRKRYTSTKEVLDATLIHQSITGLYETRIDLSQLGGDGGGSPKKKRKVSESATPESVSGWRLFKKIS

SEQ ID NO: 865-899 - skipped (35 entries)

SEQ ID NO: 900 - RNA, 22 nt, synthetic construct
  source 1..22: mol_type = other RNA
gttttagagctatgctgttttg

SEQ ID NO: 901 - RNA, 80 nt, synthetic construct
  source 1..80: mol_type = other RNA
gttttagagctagaaatagcaagttaaaataaggctagtccgttatcaacttgaaaaagtggcaccgagtcggtgctttt

SEQ ID NO: 902 - RNA, 76 nt, synthetic construct
  source 1..76: mol_type = other RNA
gttttagagctagaaatagcaagttaaaataaggctagtccgttatcaacttgaaaaagtggcaccgagtcggtgc

SEQ ID NO: 903-979 - skipped (77 entries)

SEQ ID NO: 980 - RNA, 21 nt, synthetic construct
  source 1..21: mol_type = other RNA
cttcttaatgattgaacaaaa

SEQ ID NO: 981 - RNA, 21 nt, synthetic construct
  source 1..21: mol_type = other RNA
ttttgttcaatcattaagaag

SEQ ID NO: 982 - RNA, 21 nt, synthetic construct
  source 1..21: mol_type = other RNA
agcgtttaggcatgtttaaca

SEQ ID NO: 983 - skipped

SEQ ID NO: 984 - RNA, 21 nt, synthetic construct
  source 1..21: mol_type = other RNA
tgttaaacatgcctaaacgct

SEQ ID NO: 985-999 - skipped (15 entries)

SEQ ID NO: 1000 - RNA, 20 nt, synthetic construct
  source 1..20: mol_type = other RNA
gccagactccaagttctgcc

SEQ ID NO: 1001 - RNA, 20 nt, synthetic construct
  source 1..20: mol_type = other RNA
taaggccagtggaaagaatt

SEQ ID NO: 1002 - RNA, 20 nt, synthetic construct
  source 1..20: mol_type = other RNA
ggcagcgaggagtccacagt

SEQ ID NO: 1003 - RNA, 20 nt, synthetic construct
  source 1..20: mol_type = other RNA
tctttccactggccttaacc

SEQ ID NO: 1004 - RNA, 20 nt, synthetic construct
  source 1..20: mol_type = other RNA
caatgccgtcttctgtctcg

SEQ ID NO: 1005 - RNA, 20 nt, synthetic construct
  source 1..20: mol_type = other RNA
aatgccgtcttctgtctcgt

SEQ ID NO: 1006 - RNA, 20 nt, synthetic construct
  source 1..20: mol_type = other RNA
atgccgtcttctgtctcgtg

SEQ ID NO: 1007 - RNA, 20 nt, synthetic construct
  source 1..20: mol_type = other RNA
atgccccacgagacagaaga

SEQ ID NO: 1008 - RNA, 20 nt, synthetic construct
  source 1..20: mol_type = other RNA
ctcgtggggcatcctcctgc

SEQ ID NO: 1009 - RNA, 20 nt, synthetic construct
  source 1..20: mol_type = other RNA
ggatcctcagccagggagac

SEQ ID NO: 1010 - RNA, 20 nt, synthetic construct
  source 1..20: mol_type = other RNA
tccctggctgaggatcccca

SEQ ID NO: 1011 - RNA, 20 nt, synthetic construct
  source 1..20: mol_type = other RNA
tccctggggatcctcagcca

SEQ ID NO: 1012 - RNA, 20 nt, synthetic construct
  source 1..20: mol_type = other RNA
ctccctggggatcctcagcc

SEQ ID NO: 1013 - RNA, 20 nt, synthetic construct
  source 1..20: mol_type = other RNA
gtgggatgtatctgtcttct

SEQ ID NO: 1014 - RNA, 20 nt, synthetic construct
  source 1..20: mol_type = other RNA
ggtgggatgtatctgtcttc

SEQ ID NO: 1015 - RNA, 20 nt, synthetic construct
  source 1..20: mol_type = other RNA
agatacatcccaccatgatc

SEQ ID NO: 1016 - RNA, 20 nt, synthetic construct
  source 1..20: mol_type = other RNA
tgggtgatcctgatcatggt

SEQ ID NO: 1017 - RNA, 20 nt, synthetic construct
  source 1..20: mol_type = other RNA
ttgggtgatcctgatcatgg

SEQ ID NO: 1018 - RNA, 20 nt, synthetic construct
  source 1..20: mol_type = other RNA
aggttgggtgatcctgatca

SEQ ID NO: 1019 - RNA, 20 nt, synthetic construct
  source 1..20: mol_type = other RNA
gggtgatcttgttgaaggtt

SEQ ID NO: 1020 - RNA, 20 nt, synthetic construct
  source 1..20: mol_type = other RNA
ggggtgatcttgttgaaggt

SEQ ID NO: 1021 - RNA, 20 nt, synthetic construct
  source 1..20: mol_type = other RNA
caacaagatcacccccaacc

SEQ ID NO: 1022 - RNA, 20 nt, synthetic construct
  source 1..20: mol_type = other RNA
aggcgaactcagccaggttg

SEQ ID NO: 1023 - RNA, 20 nt, synthetic construct
  source 1..20: mol_type = other RNA
gaaggcgaactcagccaggt

SEQ ID NO: 1024 - RNA, 20 nt, synthetic construct
  source 1..20: mol_type = other RNA
ggctgaaggcgaactcagcc

SEQ ID NO: 1025 - RNA, 20 nt, synthetic construct
  source 1..20: mol_type = other RNA
cagctggcggtataggctga

SEQ ID NO: 1026 - RNA, 20 nt, synthetic construct
  source 1..20: mol_type = other RNA
cttcagcctataccgccagc

SEQ ID NO: 1027 - RNA, 20 nt, synthetic construct
  source 1..20: mol_type = other RNA
ggtgtgccagctggcggtat

SEQ ID NO: 1028 - RNA, 20 nt, synthetic construct
  source 1..20: mol_type = other RNA
tgttggactggtgtgccagc

SEQ ID NO: 1029 - RNA, 20 nt, synthetic construct
  source 1..20: mol_type = other RNA
agatattggtgctgttggac

SEQ ID NO: 1030 - RNA, 20 nt, synthetic construct
  source 1..20: mol_type = other RNA
gaagaagatattggtgctgt

SEQ ID NO: 1031 - RNA, 20 nt, synthetic construct
  source 1..20: mol_type = other RNA
cactggggagaagaagatat

SEQ ID NO: 1032 - RNA, 20 nt, synthetic construct
  source 1..20: mol_type = other RNA
ggctgtagcgatgctcactg

SEQ ID NO: 1033 - RNA, 20 nt, synthetic construct
  source 1..20: mol_type = other RNA
aggctgtagcgatgctcact

SEQ ID NO: 1034 - RNA, 20 nt, synthetic construct
  source 1..20: mol_type = other RNA
aaggctgtagcgatgctcac

SEQ ID NO: 1035 - RNA, 20 nt, synthetic construct
  source 1..20: mol_type = other RNA
tgacactcacgatgaaatcc

SEQ ID NO: 1036 - RNA, 20 nt, synthetic construct
  source 1..20: mol_type = other RNA
cactcacgatgaaatcctgg

SEQ ID NO: 1037 - RNA, 20 nt, synthetic construct
  source 1..20: mol_type = other RNA
actcacgatgaaatcctgga

SEQ ID NO: 1038 - RNA, 20 nt, synthetic construct
  source 1..20: mol_type = other RNA
ggttgaaattcaggccctcc

SEQ ID NO: 1039 - RNA, 20 nt, synthetic construct
  source 1..20: mol_type = other RNA
gggcctgaatttcaacctca

SEQ ID NO: 1040 - RNA, 20 nt, synthetic construct
  source 1..20: mol_type = other RNA
tttcaacctcacggagattc

SEQ ID NO: 1041 - RNA, 20 nt, synthetic construct
  source 1..20: mol_type = other RNA
caacctcacggagattccgg

SEQ ID NO: 1042 - RNA, 20 nt, synthetic construct
  source 1..20: mol_type = other RNA
gagcctccggaatctccgtg

SEQ ID NO: 1043 - RNA, 20 nt, synthetic construct
  source 1..20: mol_type = other RNA
ccggaggctcagatccatga

SEQ ID NO: 1044 - RNA, 20 nt, synthetic construct
  source 1..20: mol_type = other RNA
tgagggtacggaggagttcc

SEQ ID NO: 1045 - RNA, 20 nt, synthetic construct
  source 1..20: mol_type = other RNA
ctggctggttgagggtacgg

SEQ ID NO: 1046 - RNA, 20 nt, synthetic construct
  source 1..20: mol_type = other RNA
ctggctgtctggctggttga

SEQ ID NO: 1047 - RNA, 20 nt, synthetic construct
  source 1..20: mol_type = other RNA
ctccagctgaccaccggcaa

SEQ ID NO: 1048 - RNA, 20 nt, synthetic construct
  source 1..20: mol_type = other RNA
ggccattgccggtggtcagc

SEQ ID NO: 1049 - RNA, 20 nt, synthetic construct
  source 1..20: mol_type = other RNA
gaggaacaggccattgccgg

SEQ ID NO: 1050 - RNA, 20 nt, synthetic construct
  source 1..20: mol_type = other RNA
gctgaggaacaggccattgc

SEQ ID NO: 1051 - RNA, 20 nt, synthetic construct
  source 1..20: mol_type = other RNA
caatggcctgttcctcagcg

SEQ ID NO: 1052 - RNA, 20 nt, synthetic construct
  source 1..20: mol_type = other RNA
aatggcctgttcctcagcga

SEQ ID NO: 1053 - RNA, 20 nt, synthetic construct
  source 1..20: mol_type = other RNA
tcaggccctcgctgaggaac

SEQ ID NO: 1054 - RNA, 20 nt, synthetic construct
  source 1..20: mol_type = other RNA
ctagcttcaggccctcgctg

SEQ ID NO: 1055 - RNA, 20 nt, synthetic construct
  source 1..20: mol_type = other RNA
cagcgagggcctgaagctag

SEQ ID NO: 1056 - RNA, 20 nt, synthetic construct
  source 1..20: mol_type = other RNA
aaaacttatccactagcttc

SEQ ID NO: 1057 - RNA, 20 nt, synthetic construct
  source 1..20: mol_type = other RNA
gaagctagtggataagtttt

SEQ ID NO: 1058 - RNA, 20 nt, synthetic construct
  source 1..20: mol_type = other RNA
gctagtggataagtttttgg

SEQ ID NO: 1059 - RNA, 20 nt, synthetic construct
  source 1..20: mol_type = other RNA
tgacagtgaaggcttctgag

SEQ ID NO: 1060 - RNA, 20 nt, synthetic construct
  source 1..20: mol_type = other RNA
aagccttcactgtcaacttc

SEQ ID NO: 1061 - RNA, 20 nt, synthetic construct
  source 1..20: mol_type = other RNA
agccttcactgtcaacttcg

SEQ ID NO: 1062 - RNA, 20 nt, synthetic construct
  source 1..20: mol_type = other RNA
gtccccgaagttgacagtga

SEQ ID NO: 1063 - RNA, 20 nt, synthetic construct
  source 1..20: mol_type = other RNA
caacttcggggacaccgaag

SEQ ID NO: 1064 - RNA, 20 nt, synthetic construct
  source 1..20: mol_type = other RNA
gatctgtttcttggcctctt

SEQ ID NO: 1065 - RNA, 20 nt, synthetic construct
  source 1..20: mol_type = other RNA
gtaatcgttgatctgtttct

SEQ ID NO: 1066 - RNA, 20 nt, synthetic construct
  source 1..20: mol_type = other RNA
gaaacagatcaacgattacg

SEQ ID NO: 1067 - RNA, 20 nt, synthetic construct
  source 1..20: mol_type = other RNA
gatcaacgattacgtggaga

SEQ ID NO: 1068 - RNA, 20 nt, synthetic construct
  source 1..20: mol_type = other RNA
atcaacgattacgtggagaa

SEQ ID NO: 1069 - RNA, 20 nt, synthetic construct
  source 1..20: mol_type = other RNA
tacgtggagaagggtactca

SEQ ID NO: 1070 - RNA, 20 nt, synthetic construct
  source 1..20: mol_type = other RNA
acgtggagaagggtactcaa

SEQ ID NO: 1071 - RNA, 20 nt, synthetic construct
  source 1..20: mol_type = other RNA
tcaagggaaaattgtggatt

SEQ ID NO: 1072 - RNA, 20 nt, synthetic construct
  source 1..20: mol_type = other RNA
gaaaattgtggatttggtca

SEQ ID NO: 1073 - RNA, 20 nt, synthetic construct
  source 1..20: mol_type = other RNA
cagagacacagtttttgctc

SEQ ID NO: 1074 - RNA, 20 nt, synthetic construct
  source 1..20: mol_type = other RNA
tcccctctctccaggcaaat

SEQ ID NO: 1075 - RNA, 20 nt, synthetic construct
  source 1..20: mol_type = other RNA
ctcggtgtccttgacttcaa

SEQ ID NO: 1076 - RNA, 20 nt, synthetic construct
  source 1..20: mol_type = other RNA
ctttgaagtcaaggacaccg

SEQ ID NO: 1077 - RNA, 20 nt, synthetic construct
  source 1..20: mol_type = other RNA
cacgtggaagtcctcttcct

SEQ ID NO: 1078 - RNA, 20 nt, synthetic construct
  source 1..20: mol_type = other RNA
cgaggaagaggacttccacg

SEQ ID NO: 1079 - RNA, 20 nt, synthetic construct
  source 1..20: mol_type = other RNA
agaggacttccacgtggacc

SEQ ID NO: 1080 - RNA, 20 nt, synthetic construct
  source 1..20: mol_type = other RNA
cggtggtcacctggtccacg

SEQ ID NO: 1081 - RNA, 20 nt, synthetic construct
  source 1..20: mol_type = other RNA
ggaccaggtgaccaccgtga

SEQ ID NO: 1082 - RNA, 20 nt, synthetic construct
  source 1..20: mol_type = other RNA
gcaccttcacggtggtcacc

SEQ ID NO: 1083 - RNA, 20 nt, synthetic construct
  source 1..20: mol_type = other RNA
catcataggcaccttcacgg

SEQ ID NO: 1084 - RNA, 20 nt, synthetic construct
  source 1..20: mol_type = other RNA
gtgcctatgatgaagcgttt

SEQ ID NO: 1085 - RNA, 20 nt, synthetic construct
  source 1..20: mol_type = other RNA
atgcctaaacgcttcatcat

SEQ ID NO: 1086 - RNA, 20 nt, synthetic construct
  source 1..20: mol_type = other RNA
tggacagcttcttacagtgc

SEQ ID NO: 1087 - RNA, 20 nt, synthetic construct
  source 1..20: mol_type = other RNA
ctgtaagaagctgtccagct

SEQ ID NO: 1088 - RNA, 20 nt, synthetic construct
  source 1..20: mol_type = other RNA
ggtgctgctgatgaaatacc

SEQ ID NO: 1089 - RNA, 20 nt, synthetic construct
  source 1..20: mol_type = other RNA
gtgctgctgatgaaatacct

SEQ ID NO: 1090 - RNA, 20 nt, synthetic construct
  source 1..20: mol_type = other RNA
agatggcggtggcattgccc

SEQ ID NO: 1091 - RNA, 20 nt, synthetic construct
  source 1..20: mol_type = other RNA
aggcaggaagaagatggcgg

SEQ ID NO: 1092 - RNA, 20 nt, synthetic construct
  source 1..20: mol_type = other RNA
ggtcagcacagccttatgca

SEQ ID NO: 1093 - RNA, 20 nt, synthetic construct
  source 1..20: mol_type = other RNA
agaaagggactgaagctgct

SEQ ID NO: 1094 - RNA, 20 nt, synthetic construct
  source 1..20: mol_type = other RNA
gaaagggactgaagctgctg

SEQ ID NO: 1095 - RNA, 20 nt, synthetic construct
  source 1..20: mol_type = other RNA
tgctggggccatgtttttag

SEQ ID NO: 1096 - RNA, 20 nt, synthetic construct
  source 1..20: mol_type = other RNA
gggtatggcctctaaaaaca

SEQ ID NO: 1097 - RNA, 20 nt, synthetic construct
  source 1..20: mol_type = other RNA
tgttgaacttgacctcgggg

SEQ ID NO: 1098 - RNA, 20 nt, synthetic construct
  source 1..20: mol_type = other RNA
gggtttgttgaacttgacct

SEQ ID NO: 1099 - RNA, 20 nt, synthetic construct
  source 1..20: mol_type = other RNA
ttctgggcagcatctccctg

SEQ ID NO: 1100 - RNA, 20 nt, synthetic construct
  source 1..20: mol_type = other RNA
tcttctgggcagcatctccc

SEQ ID NO: 1101 - RNA, 20 nt, synthetic construct
  source 1..20: mol_type = other RNA
tggactggtgtgccagctgg

SEQ ID NO: 1102 - RNA, 20 nt, synthetic construct
  source 1..20: mol_type = other RNA
agcctttgcaatgctctccc

SEQ ID NO: 1103 - RNA, 20 nt, synthetic construct
  source 1..20: mol_type = other RNA
ttcatcgtgagtgtcagcct

SEQ ID NO: 1104 - RNA, 20 nt, synthetic construct
  source 1..20: mol_type = other RNA
tctccgtgaggttgaaattc

SEQ ID NO: 1105 - RNA, 20 nt, synthetic construct
  source 1..20: mol_type = other RNA
gtcagctggagctggctgtc

SEQ ID NO: 1106 - RNA, 20 nt, synthetic construct
  source 1..20: mol_type = other RNA
agccagctccagctgaccac

SEQ ID NO: 1107 - RNA, 20 nt, synthetic construct
  source 1..20: mol_type = other RNA
atcaggcaggaagaagatgg

SEQ ID NO: 1108 - RNA, 20 nt, synthetic construct
  source 1..20: mol_type = other RNA
catcttcttcctgcctgatg

SEQ ID NO: 1109 - RNA, 20 nt, synthetic construct
  source 1..20: mol_type = other RNA
atcttcttcctgcctgatga

SEQ ID NO: 1110 - RNA, 20 nt, synthetic construct
  source 1..20: mol_type = other RNA
cgatatcatcaccaagttcc

SEQ ID NO: 1111 - RNA, 20 nt, synthetic construct
  source 1..20: mol_type = other RNA
cagatcataggttccagtaa

SEQ ID NO: 1112 - RNA, 20 nt, synthetic construct
  source 1..20: mol_type = other RNA
atcactaaggtcttcagcaa

SEQ ID NO: 1113 - RNA, 20 nt, synthetic construct
  source 1..20: mol_type = other RNA
tcactaaggtcttcagcaat

SEQ ID NO: 1114 - RNA, 20 nt, synthetic construct
  source 1..20: mol_type = other RNA
cactaaggtcttcagcaatg

SEQ ID NO: 1115 - RNA, 20 nt, synthetic construct
  source 1..20: mol_type = other RNA
ctcaccttggagagcttcag

SEQ ID NO: 1116 - RNA, 20 nt, synthetic construct
  source 1..20: mol_type = other RNA
tctcaccttggagagcttca

SEQ ID NO: 1117 - RNA, 20 nt, synthetic construct
  source 1..20: mol_type = other RNA
atctcaccttggagagcttc

SEQ ID NO: 1118 - RNA, 20 nt, synthetic construct
  source 1..20: mol_type = other RNA
ttgttgaacttgacctcggg

SEQ ID NO: 1119 - RNA, 20 nt, synthetic construct
  source 1..20: mol_type = other RNA
tttgttgaacttgacctcgg

SEQ ID NO: 1120 - RNA, 20 nt, synthetic construct
  source 1..20: mol_type = other RNA
gtttgttgaacttgacctcg

SEQ ID NO: 1121 - RNA, 20 nt, synthetic construct
  source 1..20: mol_type = other RNA
ggtttgttgaacttgacctc

SEQ ID NO: 1122 - RNA, 20 nt, synthetic construct
  source 1..20: mol_type = other RNA
tcaatcattaagaagacaaa

SEQ ID NO: 1123 - RNA, 20 nt, synthetic construct
  source 1..20: mol_type = other RNA
ttcaatcattaagaagacaa

SEQ ID NO: 1124 - RNA, 20 nt, synthetic construct
  source 1..20: mol_type = other RNA
taccaagtctcccctcttca

SEQ ID NO: 1125 - RNA, 20 nt, synthetic construct
  source 1..20: mol_type = other RNA
accaagtctcccctcttcat

SEQ ID NO: 1126 - RNA, 20 nt, synthetic construct
  source 1..20: mol_type = other RNA
tcccctcttcatgggaaaag

SEQ ID NO: 1127 - RNA, 20 nt, synthetic construct
  source 1..20: mol_type = other RNA
caccacttttcccatgaaga

SEQ ID NO: 1128 - RNA, 20 nt, synthetic construct
  source 1..20: mol_type = other RNA
tcaccacttttcccatgaag

SEQ ID NO: 1129 - RNA, 20 nt, synthetic construct
  source 1..20: mol_type = other RNA
actcacgatgaaatcctgga

SEQ ID NO: 1130 - RNA, 20 nt, synthetic construct
  source 1..20: mol_type = other RNA
caacctcacggagattccgg

SEQ ID NO: 1131 - RNA, 20 nt, synthetic construct
  source 1..20: mol_type = other RNA
tgttggactggtgtgccagc

SEQ ID NO: 1132 - RNA, 100 nt, synthetic construct
  source 1..100: mol_type = other RNA
actcacgatgaaatcctggagttttagagctagaaatagcaagttaaaataaggctagtccgttatcaacttgaaaaagtggcaccgagtcggtgctttt

SEQ ID NO: 1133 - RNA, 100 nt, synthetic construct
  source 1..100: mol_type = other RNA
  misc_feature 1..4: note = Phosphorothiate linkage
  modified_base 1: mod_base = OTHER; note = 2' methyl adenosine
  modified_base 2: mod_base = cm
  modified_base 3: mod_base = um
  modified_base 29: mod_base = gm
  modified_base 30: mod_base = cm
  modified_base 31: mod_base = um
  modified_base 32: mod_base = OTHER; note = 2' methyl adenosine
  modified_base 33: mod_base = gm
  modified_base 34..36: mod_base = OTHER; note = 2' methyl adenosine
  modified_base 37: mod_base = um
  modified_base 38: mod_base = OTHER; note = 2' methyl adenosine
  modified_base 39: mod_base = gm
  modified_base 40: mod_base = cm
  modified_base 69: mod_base = OTHER; note = 2' methyl adenosine
  modified_base 70: mod_base = cm
  modified_base 71..72: mod_base = um
  modified_base 73: mod_base = gm
  modified_base 74..78: mod_base = OTHER; note = 2' methyl adenosine
  modified_base 79: mod_base = gm
  modified_base 80: mod_base = um
  modified_base 81..82: mod_base = gm
  modified_base 83: mod_base = cm
  modified_base 84: mod_base = OTHER; note = 2' methyl adenosine
  modified_base 85..86: mod_base = cm
  modified_base 87: mod_base = gm
  modified_base 88: mod_base = OTHER; note = 2' methyl adenosine
  modified_base 89: mod_base = gm
  modified_base 90: mod_base = um
  modified_base 91: mod_base = cm
  modified_base 92..93: mod_base = gm
  modified_base 94: mod_base = um
  modified_base 95: mod_base = gm
  modified_base 96: mod_base = cm
  modified_base 97..100: mod_base = um
  misc_feature 97..100: note = Phosphorothiate linkage
caacctcacggagattccgggttttagagctagaaatagcaagttaaaataaggctagtccgttatcaacttgaaaaagtggcaccgagtcggtgctttt

SEQ ID NO: 1134 - RNA, 100 nt, synthetic construct; identical to SEQ ID NO: 1133
  source 1..100: mol_type = other RNA

SEQ ID NO: 1135 - RNA, 100 nt, synthetic construct; identical to SEQ ID NO: 1133
  source 1..100: mol_type = other RNA
  misc_feature 1..4: note = Phosphorothiate linkage
  modified_base 1: mod_base = cm
  modified_base 2..3: mod_base = OTHER; note = 2' methyl adenosine
  modified_base 29: mod_base = gm
  modified_base 30: mod_base = cm
  modified_base 31: mod_base = um
  modified_base 32: mod_base = OTHER; note = 2' methyl adenosine
  modified_base 33: mod_base = gm
  modified_base 34..36: mod_base = OTHER; note = 2' methyl adenosine
  modified_base 37: mod_base = um
  modified_base 38: mod_base = OTHER; note = 2' methyl adenosine
  modified_base 39: mod_base = gm
  modified_base 40: mod_base = cm
  modified_base 69: mod_base = OTHER; note = 2' methyl adenosine
  modified_base 70: mod_base = cm
  modified_base 71..72: mod_base = um
  modified_base 73: mod_base = gm
  modified_base 74..78: mod_base = OTHER; note = 2' methyl adenosine
  modified_base 79: mod_base = gm
  modified_base 80: mod_base = um
  modified_base 81..82: mod_base = gm
  modified_base 83: mod_base = cm
  modified_base 84: mod_base = OTHER; note = 2' methyl adenosine
  modified_base 85..86: mod_base = cm
  modified_base 87: mod_base = gm
  modified_base 88: mod_base = OTHER; note = 2' methyl adenosine
  modified_base 89: mod_base = gm
  modified_base 90: mod_base = um
  modified_base 91: mod_base = cm
  modified_base 92..93: mod_base = gm
  modified_base 94: mod_base = um
  modified_base 95: mod_base = gm
  modified_base 96: mod_base = cm
  modified_base 97..100: mod_base = um
  misc_feature 97..100: note = Phosphorothiate linkage

SEQ ID NO: 1136 - RNA, 100 nt, synthetic construct
  source 1..100: mol_type = other RNA
tgttggactggtgtgccagcgttttagagctagaaatagcaagttaaaataaggctagtccgttatcaacttgaaaaagtggcaccgagtcggtgctttt

SEQ ID NO: 1137 - RNA, 100 nt, synthetic construct; identical to SEQ ID NO: 1136
  source 1..100: mol_type = other RNA
  misc_feature 1..4: note = Phosphorothiate linkage
  modified_base 1: mod_base = um
  modified_base 2: mod_base = gm
  modified_base 3: mod_base = um
  modified_base 29: mod_base = gm
  modified_base 30: mod_base = cm
  modified_base 31: mod_base = um
  modified_base 32: mod_base = OTHER; note = 2' methyl adenosine
  modified_base 33: mod_base = gm
  modified_base 34..36: mod_base = OTHER; note = 2' methyl adenosine
  modified_base 37: mod_base = um
  modified_base 38: mod_base = OTHER; note = 2' methyl adenosine
  modified_base 39: mod_base = gm
  modified_base 40: mod_base = cm
  modified_base 69: mod_base = OTHER; note = 2' methyl adenosine
  modified_base 70: mod_base = cm
  modified_base 71..72: mod_base = um
  modified_base 73: mod_base = gm
  modified_base 74..78: mod_base = OTHER; note = 2' methyl adenosine
  modified_base 79: mod_base = gm
  modified_base 80: mod_base = um
  modified_base 81..82: mod_base = gm
  modified_base 83: mod_base = cm
  modified_base 84: mod_base = OTHER; note = 2' methyl adenosine
  modified_base 85..86: mod_base = cm
  modified_base 87: mod_base = gm
  modified_base 88: mod_base = OTHER; note = 2' methyl adenosine
  modified_base 89: mod_base = gm
  modified_base 90: mod_base = um
  modified_base 91: mod_base = cm
  modified_base 92..93: mod_base = gm
  modified_base 94: mod_base = um
  modified_base 95: mod_base = gm
  modified_base 96: mod_base = cm
  modified_base 97..100: mod_base = um
  misc_feature 97..100: note = Phosphorothiate linkage

SEQ ID NO: 1138-1300 - skipped (163 entries)

SEQ ID NO: 1301 - DNA, 100 bp, synthetic construct
  source 1..100: mol_type = other DNA
taggtcagtgaagagaagaacaaaaagcagcatattacagttagttgtcttcatcaatctttaaatatgttgtgtggtttttctctccctgtttccacag

SEQ ID NO: 1302 - DNA, 100 bp, synthetic construct
  source 1..100: mol_type = other DNA
ctgtggaaacagggagagaaaaaccacacaacatatttaaagattgatgaagacaactaactgtaatatgctgctttttgttcttctcttcactgaccta

SEQ ID NO: 1303 - skipped

SEQ ID NO: 1304 - DNA, 192 bp, synthetic construct
  source 1..192: mol_type = other DNA
cagacatgataagatacattgatgagtttggacaaaccacaactagaatgcagtgaaaaaaatgctttatttgtgaaatttgtgatgctattgctttatttgtaaccattataagctgcaataaacaagttaacaacaacaattgcattcattttatgtttcaggttcagggggaggtgtgggaggtttttt

SEQ ID NO: 1305 - DNA, 276 bp, synthetic construct
  source 1..276: mol_type = other DNA
ggggataccccctagagccccagctggttcttttctcctcagaagccatagagcccatctcatccccagcatgcctgctattgtcttcccaatcctcccccttgctgtcctgccccaccccaccccccagaatagaatgacacctactcagacaattctatgcaatttcctcattttattaggaaaggacagtgggagtggcaccttccagggtcaaggaaggcatgggggaggggcaaacaacagatggctggcaactagaaggcacagtctagg

SEQ ID NO: 1306-1379 - skipped (74 entries)

SEQ ID NO: 1380 - DNA, 1257 bp, synthetic construct
  source 1..1257: mol_type = other DNA
atgccgtcttctgtctcgtggggcatcctcctgctggcaggcctgtgctgcctggtccctgtctccctggctgaggatccccagggagatgctgcccagaagacagatacatcccaccatgatcaggatcacccaaccttcaacaagatcacccccaacctggctgagttcgccttcagcctataccgccagctggcacaccagtccaacagcaccaatatcttcttctccccagtgagcatcgctacagcctttgcaatgctctccctggggaccaaggctgacactcacgatgaaatcctggagggcctgaatttcaacctcacggagattccggaggctcagatccatgaaggcttccaggaactcctccgtaccctcaaccagccagacagccagctccagctgaccaccggcaatggcctgttcctcagcgagggcctgaagctagtggataagtttttggaggatgttaaaaagttgtaccactcagaagccttcactgtcaacttcggggacaccgaagaggccaagaaacagatcaacgattacgtggagaagggtactcaagggaaaattgtggatttggtcaaggagcttgacagagacacagtttttgctctggtgaattacatcttctttaaaggcaaatgggagagaccctttgaagtcaaggacaccgaggaagaggacttccacgtggaccaggtgaccaccgtgaaggtgcctatgatgaagcgtttaggcatgtttaacatccagcactgtaagaagctgtccagctgggtgctgctgatgaaatacctgggcaatgccaccgccatcttcttcctgcctgatgaggggaaactacagcacctggaaaatgaactcacccacgatatcatcaccaagttcctggaaaatgaagacagaaggtctgccagcttacatttacccaaactgtccattactggaacctatgatctgaagagcgtcctgggtcaactgggcatcactaaggtcttcagcaatggggctgacctctccggggtcacagaggaggcacccctgaagctctccaaggccgtgcataaggctgtgctgaccatcgacgagaaagggactgaagctgctggggccatgtttttagaggccatacccatgtctatcccccccgaggtcaagttcaacaaaccctttgtcttcttaatgattgaacaaaataccaagtctcccctcttcatgggaaaagtggtgaatcccacccaaaaataa

SEQ ID NO: 1381 - skipped

SEQ ID NO: 1382 - DNA, 1266 bp, synthetic construct
  source 1..1266: mol_type = other DNA
atgaagtgggtaacctttatttcccttctttttctctttagctcggcttattccaggggtgtgtttcgtcgagatgcacttgaggatccccagggagatgctgcccagaagacagatacatcccaccatgatcaggatcacccaaccttcaacaagatcacccccaacctggctgagttcgccttcagcctataccgccagctggcacaccagtccaacagcaccaatatcttcttctccccagtgagcatcgctacagcctttgcaatgctctccctggggaccaaggctgacactcacgatgaaatcctggagggcctgaatttcaacctcacggagattccggaggctcagatccatgaaggcttccaggaactcctccgtaccctcaaccagccagacagccagctccagctgaccaccggcaatggcctgttcctcagcgagggcctgaagctagtggataagtttttggaggatgttaaaaagttgtaccactcagaagccttcactgtcaacttcggggacaccgaagaggccaagaaacagatcaacgattacgtggagaagggtactcaagggaaaattgtggatttggtcaaggagcttgacagagacacagtttttgctctggtgaattacatcttctttaaaggcaaatgggagagaccctttgaagtcaaggacaccgaggaagaggacttccacgtggaccaggtgaccaccgtgaaggtgcctatgatgaagcgtttaggcatgtttaacatccagcactgtaagaagctgtccagctgggtgctgctgatgaaatacctgggcaatgccaccgccatcttcttcctgcctgatgaggggaaactacagcacctggaaaatgaactcacccacgatatcatcaccaagttcctggaaaatgaagacagaaggtctgccagcttacatttacccaaactgtccattactggaacctatgatctgaagagcgtcctgggtcaactgggcatcactaaggtcttcagcaatggggctgacctctccggggtcacagaggaggcacccctgaagctctccaaggccgtgcataaggctgtgctgaccatcgacgagaaagggactgaagctgctggggccatgtttttagaggccatacccatgtctatcccccccgaggtcaagttcaacaaaccctttgtcttcttaatgattgaacaaaataccaagtctcccctcttcatgggaaaagtggtgaatcccacccaaaaataa

SEQ ID NO: 1383 - skipped

SEQ ID NO: 1384 - DNA, 1266 bp, synthetic construct
  source 1..1266: mol_type = other DNA
atgaagtgggtaacctttatttcccttctttttctctttagctcggcttattccaggggtgtgtttcgtcgagatgcacttgaggacccccagggagatgcagcccagaagacagacaccagccaccatgaccaggaccaccccaccttcaacaagatcacccccaacctggcagagtttgccttcagcctgtacaggcagctggcccaccagagcaacagcaccaacatcttcttcagcccagtgagcatagccacagcctttgccatgctgagcctgggcaccaaggcagacacccatgatgagatcctggagggcctgaacttcaacctgacagagatcccagaggcccagatccatgagggcttccaggagctgctgaggaccctgaaccagccagacagccagctgcagctgaccacaggcaatggcctgttcctgtctgagggcctgaagctggtggacaagttcctggaggatgtgaagaagctgtaccactctgaggccttcacagtgaactttggagacacagaggaggccaagaagcagatcaatgactatgtggagaagggcacccagggcaagatagtggacctggtgaaggagctggacagggacacagtgtttgccctggtgaactacatcttcttcaagggcaagtgggagaggccctttgaggtgaaggacacagaggaggaggacttccatgtggaccaggtgaccacagtgaaggtgcccatgatgaagaggctgggcatgttcaatatccagcactgcaagaagctgagcagctgggtgctgctgatgaagtacctgggcaatgccacagccatcttcttcctgccagatgagggcaagctgcagcacctggagaatgagctgacccatgacatcatcaccaagttcctggagaatgaggacaggaggtctgccagcctgcacctgcccaagctgagcatcacaggcacctatgacctgaagtctgtgctgggccagctgggcatcaccaaggtgttcagcaatggagcagacctgtctggagtgacagaggaggcccccctgaagctgagcaaggcagtgcacaaggcagtgctgaccatagatgagaagggcacagaggcagcaggagccatgttcctggaggccatccccatgagcatccccccagaggtgaagttcaacaagccttttgtgttcctgatgatagagcagaacaccaagagccccctgttcatgggcaaggtggtgaaccccacccagaagtaa

SEQ ID NO: 1385 - skipped

SEQ ID NO: 1386 - DNA, 1266 bp, synthetic construct
  source 1..1266: mol_type = other DNA
atgaagtgggtaacctttatttcccttctttttctctttagctcggcttattccaggggtgtgtttcgtcgagatgcacttgaggatccccagggagatgctgcccagaagacagatacatcccaccatgatcaggatcacccaaccttcaacaagatcacccccaacctggctgagtttgccttcagcctatacagacagctggcacaccagtccaacagcaccaatatcttcttctccccagtgagcatagctacagcctttgcaatgctctccctggggaccaaggctgacactcatgatgaaatcctggagggcctgaatttcaacctcacagagattccagaggctcagatccatgaaggcttccaggaactcctcagaaccctcaaccagccagacagccagctccagctgaccacaggcaatggcctgttcctctctgagggcctgaagctagtggataagtttttggaggatgttaaaaagttgtaccactcagaagccttcactgtcaactttggggacacagaagaggccaagaaacagatcaatgattatgtggagaagggtactcaagggaaaattgtggatttggtcaaggagcttgacagagacacagtttttgctctggtgaattacatcttctttaaaggcaaatgggagagaccctttgaagtcaaggacacagaggaagaggacttccatgtggaccaggtgaccacagtgaaggtgcctatgatgaaaaggcttggtatgttcaatatccagcactgtaagaagctgtccagctgggtgctgctgatgaaatacctgggcaatgccacagccatcttcttcctgcctgatgaggggaaactacagcacctggaaaatgaactcacccatgatatcatcaccaagttcctggaaaatgaagacagaaggtctgccagcttacatttacccaaactgtccattactggaacctatgatctgaagtctgtcctgggtcaactgggcatcactaaggtcttcagcaatggggctgacctctctggggtcacagaggaggcacccctgaagctctccaaggcagtgcataaggctgtgctgaccatagatgagaagggcacagaggctgctggggccatgtttttagaggccatacccatgtctatccccccagaggtcaagttcaacaaaccttttgtatttctcatgatagagcagaacactaaatcacccctcttcatgggaaaagtggtgaatcccacccaaaaataa

SEQ ID NO: 1387 - skipped

SEQ ID NO: 1388 - DNA, 1263 bp, synthetic construct
  source 1..1263: mol_type = other DNA
atgaagtgggtaacctttatttcccttctttttctctttagctcggcttattccaggggtgtgtttcgtcgagatgcacttgaggacccccagggagatgctgcccagaagacagacacatctcaccatgaccaggaccaccccaccttcaacaagatcactcccaatcttgcagagtttgcattctctctctacagacagcttgcacaccagagcaactctactaacatcttcttctctccagtcagcatagcaacagcatttgcaatgctcagccttggcacaaaggcagacacacatgatgagatccttgagggcctcaacttcaatctcacagagatcccagaagcccagatccatgagggcttccaggagctgctgagaacactcaaccagcctgactctcagctccagctcacaacaggcaatgggctcttcctctctgagggcctcaagcttgtagacaagttcctggaggatgtcaagaagctctaccactctgaagccttcacagtcaactttggagacacagaggaagccaagaagcagatcaatgactatgtagagaaggggactcagggcaagatagtagaccttgtcaaggagctggacagagacacagtctttgcactggtcaactacatcttcttcaaggggaagtgggagagaccctttgaagtcaaggacacagaggaggaggacttccatgtagaccaggtgacaacagtcaaggttcccatgatgaagagacttggcatgttcaatatccagcactgcaagaagctcagctcttgggtcctcctcatgaagtaccttggcaatgcaacagcaatcttcttccttcctgatgagggcaagctccagcaccttgagaatgagctgacacatgacatcatcacaaagttcctggagaatgaggacagaaggtctgcatctctccaccttccaaagctcagcatcacaggcacctatgacctcaagtctgtccttggccagcttggcatcacaaaggtcttctctaatggtgcagacctctctggagtcacagaggaagcccccctcaagctcagcaaggctgtgcacaaggctgtgctcacaatagatgagaaggggacagaggctgcaggtgccatgttcctggaagccatccccatgagcatcccaccagaagtcaagttcaacaagccttttgtcttcctgatgatagagcagaacacaaagtctcccctcttcatgggcaaggtagtcaaccccactcaaaag

SEQ ID NO: 1389 - skipped

SEQ ID NO: 1390 - DNA, 1266 bp, synthetic construct; identical to SEQ ID NO: 1384
  source 1..1266: mol_type = other DNA

SEQ ID NO: 1391-1399 - skipped (9 entries)

SEQ ID NO: 1400 - DNA, 1185 bp, synthetic construct; identical to SEQ ID NO: 721
  source 1..1185: mol_type = other DNA

SEQ ID NO: 1401 - DNA, 1185 bp, synthetic construct
  source 1..1185: mol_type = other DNA
ttatttttgggtgggattcaccacttttcccatgaagaggggtgatttagtgttctgctcgatcatgagaaatacaaaaggtttgttgaacttgacctcgggggggatagacatgggtatggcctctaaaaacatggccccagcagcctcggtgcccttctcgtcgatggtcagcacagccttatgcacggccttggagagcttcaggggtgcctcctctgtgaccccggagaggtcagccccattgctgaagaccttagtgatgcccagttgacccaggacgctcttcagatcataggttccagtaatggacagtttgggtaaatgtaagctggcagaccttctgtcttcattttccaggaacttggtgatgatatcgtgggtgagttcattttccaggtgctgtagtttcccctcatcaggcaggaagaagatggcggtggcattgcccaggtatttcatcagcagcacccagctggacagcttcttacagtgctggatattgaacataccaagccttttcatcataggcaccttcacggtggtcacctggtccacgtggaagtcctcttcctcggtgtccttgacttcaaagggtctctcccatttgcctttaaagaagatgtaattcaccagagcaaaaactgtgtctctgtcaagctccttgaccaaatccacaattttcccttgagtacccttctccacgtaatcgttgatctgtttcttggcctcttcggtgtccccgaagttgacagtgaaggcttctgagtggtacaactttttaacatcctccaaaaacttatccactagcttcaggccctcgctgaggaacaggccattgccggtggtcagctggagctggctgtctggctggttgagggtacggaggagttcctggaagccttcatggatctgagcctccggaatctccgtgaggttgaaattcaggccctccaggatttcatcgtgagtgtcagccttggtccccagggagagcattgcaaaggctgtagcgatgctcactggggagaagaagatattggtgctgttggactggtgtgccagctggcggtataggctgaaggcgaactcagccaggttgggggtgatcttgttgaaggttgggtgatcctgatcatggtgggatgtatctgtcttctgggcagcatctccctggggatcctc

SEQ ID NO: 1402 - DNA, 1185 bp, synthetic construct; identical to SEQ ID NO: 771
  source 1..1185: mol_type = other DNA

SEQ ID NO: 1403 - DNA, 1185 bp, synthetic construct
  source 1..1185: mol_type = other DNA
ttatttttgggtgggattcaccacttttcccatgaagaggggtgatttagtgttctgctctatcatgagaaatacaaaaggtttgttgaacttgacctctggggggatagacatgggtatggcctctaaaaacatggccccagcagcctctgtgcccttctcatctatggtcagcacagccttatgcactgccttggagagcttcaggggtgcctcctctgtgaccccagagaggtcagccccattgctgaagaccttagtgatgcccagttgacccaggacagacttcagatcataggttccagtaatggacagtttgggtaaatgtaagctggcagaccttctgtcttcattttccaggaacttggtgatgatatcatgggtgagttcattttccaggtgctgtagtttcccctcatcaggcaggaagaagatggctgtggcattgcccaggtatttcatcagcagcacccagctggacagcttcttacagtgctggatattgaacataccaagccttttcatcataggcaccttcactgtggtcacctggtccacatggaagtcctcttcctctgtgtccttgacttcaaagggtctctcccatttgcctttaaagaagatgtaattcaccagagcaaaaactgtgtctctgtcaagctccttgaccaaatccacaattttcccttgagtacccttctccacataatcattgatctgtttcttggcctcttctgtgtccccaaagttgacagtgaaggcttctgagtggtacaactttttaacatcctccaaaaacttatccactagcttcaggccctcagagaggaacaggccattgcctgtggtcagctggagctggctgtctggctggttgagggttctgaggagttcctggaagccttcatggatctgagcctctggaatctctgtgaggttgaaattcaggccctccaggatttcatcatgagtgtcagccttggtccccagggagagcattgcaaaggctgtagctatgctcactggggagaagaagatattggtgctgttggactggtgtgccagctgtctgtataggctgaaggcaaactcagccaggttgggggtgatcttgttgaaggttgggtgatcctgatcatggtgggatgtatctgtcttctgggcagcatctccctggggatcctc

SEQ ID NO: 1404 - DNA, 1182 bp, synthetic construct; identical to SEQ ID NO: 781
  source 1..1182: mol_type = other DNA

SEQ ID NO: 1405 - DNA, 1257 bp, Homo sapiens; identical to SEQ ID NO: 1380
  source 1..1257: mol_type = genomic DNA

SEQ ID NO: 1406 - protein, 418 aa, Homo sapiens; identical to SEQ ID NO: 700

SEQ ID NO: 1407 - protein, 421 aa, Homo sapiens
MKWVTFISLLFLFSSAYSRGVFRRDALEDPQGDAAQKTDTSHHDQDHPTFNKITPNLAEFAFSLYRQLAHQSNSTNIFFSPVSIATAFAMLSLGTKADTHDEILEGLNFNLTEIPEAQIHEGFQELLRTLNQPDSQLQLTTGNGLFLSEGLKLVDKFLEDVKKLYHSEAFTVNFGDTEEAKKQINDYVEKGTQGKIVDLVKELDRDTVFALVNYIFFKGKWERPFEVKDTEEEDFHVDQVTTVKVPMMKRLGMFNIQHCKKLSSWVLLMKYLGNATAIFFLPDEGKLQHLENELTHDIITKFLENEDRRSASLHLPKLSITGTYDLKSVLGQLGITKVFSNGADLSGVTEEAPLKLSKAVHKAVLTIDEKGTEAAGAMFLEAIPMSIPPEVKFNKPFVFLMIEQNTKSPLFMGKVVNPTQK

SEQ ID NO: 1408 - protein, 397 aa, Homo sapiens
DALEDPQGDAAQKTDTSHHDQDHPTFNKITPNLAEFAFSLYRQLAHQSNSTNIFFSPVSIATAFAMLSLGTKADTHDEILEGLNFNLTEIPEAQIHEGFQELLRTLNQPDSQLQLTTGNGLFLSEGLKLVDKFLEDVKKLYHSEAFTVNFGDTEEAKKQINDYVEKGTQGKIVDLVKELDRDTVFALVNYIFFKGKWERPFEVKDTEEEDFHVDQVTTVKVPMMKRLGMFNIQHCKKLSSWVLLMKYLGNATAIFFLPDEGKLQHLENELTHDIITKFLENEDRRSASLHLPKLSITGTYDLKSVLGQLGITKVFSNGADLSGVTEEAPLKLSKAVHKAVLTIDEKGTEAAGAMFLEAIPMSIPPEVKFNKPFVFLMIEQNTKSPLFMGKVVNPTQK

SEQ ID NO: 1409 - protein, 418 aa, Homo sapiens; identical to SEQ ID NO: 700

SEQ ID NO: 1410 - protein, 394 aa, Homo sapiens; identical to SEQ ID NO: 702

SEQ ID NO: 1411-1499 - skipped (89 entries)

SEQ ID NO: 1500 - RNA, 100 nt, synthetic construct; identical to SEQ ID NO: 40
  source 1..100: mol_type = other RNA

SEQ ID NO: 1501 - skipped

SEQ ID NO: 1502 - RNA, 20 nt, synthetic construct
  source 1..20: mol_type = other RNA
agaccttagtgatacccagg

SEQ ID NO: 1503 - skipped

SEQ ID NO: 1504 - RNA, 100 nt, synthetic construct
  source 1..100: mol_type = other RNA
agaccttagtgatacccagggttttagagctagaaatagcaagttaaaataaggctagtccgttatcaacttgaaaaagtggcaccgagtcggtgctttt

SEQ ID NO: 1505 - skipped

SEQ ID NO: 1506 - RNA, 100 nt, synthetic construct; identical to SEQ ID NO: 1504
  source 1..100: mol_type = other RNA

SEQ ID NO: 1507-1549 - skipped (43 entries)

SEQ ID NO: 1550 - DNA, 3564 bp, synthetic construct
  source 1..3564: mol_type = other DNA
taggtcagtgaagagaagaacaaaaagcagcatattacagttagttgtcttcatcaatctttaaatatgttgtgtggtttttctctccctgtttccacagtttttcttgatcatgaaaacgccaacaaaattctgaatcggccaaagaggtataattcaggtaaattggaagagtttgttcaagggaaccttgagagagaatgtatggaagaaaagtgtagttttgaagaagcagtattcactttggaggactttgtcggtgactggaggcaaaccgctggttataatctcgaccaagtactggaacagggcggggtaagttccctctttcagaatttgggtgtaagcgtcacaccaatccagcggattgtgttgtctggagagaacggactcaaaattgacatccatgttatcattccatatgaaggtctcagtggagaccaaatggggcagatcgagaagattttcaaggtagtttacccagtcgacgatcaccacttcaaagtcattctccactatggcacacttgttatcgacggagtaactcctaatatgattgattactttggtcgcccgtatgagggcatcgcagtgtttgatggcaaaaagatcaccgtaacaggaacgttgtggaatgggaacaagataatcgacgagagattgataaatccagacgggtcactcctgttcagggttacaattaacggcgtcacaggatggagactctgtgaacgaatactggccacaaatttttcactcctgaagcaggccggagacgtggaggaaaacccagggcccgtgagcaagggcgaggagctgttcaccggggtggtgcccatcctggtcgagctggacggcgacgtaaacggccacaagttcagcgtgtccggcgagggcgagggcgatgccacctacggcaagctgaccctgaagttcatctgcaccaccggcaagctgcccgtgccctggcccaccctcgtgaccaccctgacctacggcgtgcagtgcttcagccgctaccccgaccacatgaagcagcacgacttcttcaagtccgccatgcccgaaggctacgtccaggagcgcaccatcttcttcaaggacgacggcaactacaagacccgcgccgaggtgaagttcgagggcgacaccctggtgaaccgcatcgagctgaagggcatcgacttcaaggaggacggcaacatcctggggcacaagctggagtacaactacaacagccacaacgtctatatcatggccgacaagcagaagaacggcatcaaggtgaacttcaagatccgccacaacatcgaggacggcagcgtgcagctcgccgaccactaccagcagaacacccccatcggcgacggccccgtgctgctgcccgacaaccactacctgagcacccagtccgccctgagcaaagaccccaacgagaagcgcgatcacatggtcctgctggagttcgtgaccgccgccgggatcactctcggcatggacgagctgtacaagggaggaggaagcccgaagaagaagagaaaggtctaacctcgactgtgccttctagttgccagccatctgttgtttgcccctcccccgtgccttccttgaccctggaaggtgccactcccactgtcctttcctaataaaatgaggaaattgcatcgcattgtctgagtaggtgtcattctattctggggggtggggtggggcaggacagcaagggggaggattgggaagacaatagcaggcatgctggggatgcggtgggctctatggcttctgaggcggaaagaaccagctggggctctagggggtatccccaaaaaacctcccacacctccccctgaacctgaaacataaaatgaatgcaattgttgttgttaacttgtttattgcagcttataatggttacaaataaagcaatagcatcacaaatttcacaaataaagcatttttttcactgcattctagttgtggtttgtccaaactcatcaatgtatcttatcatgtctgttacaccttcctcttcttcttggggctgccgccgcccttgtacagctcgtccatgcccagggtgatgccggcggcggtcacgaactccagcagcaccatgtggtccctcttctcgttggggtccttgctcagggcgctctgggtgctcaggtagtggttgtcgggcagcagcacggggccgtcgccgatgggggtgttctgctggtagtggtcggccagctgcacgctgccgtcctcgatgttgtgcctgatcttgaagttcaccttgatgccgttcttctgcttgtcggccatgatgtacacgttgtggctgttgtagttgtactccagcttgtggcccaggatgttgccgtcctccttgaagtcgatgcccttcagctcgatcctgttcaccagggtgtcgccctcgaacttcacctcggccctggtcttgtagttgccgtcgtccttgaagaagatggtcctctcctgcacgtagccctcgggcatggcgctcttgaagaagtcgtgctgcttcatgtggtcggggtacctgctgaagcactgcacgccgtaggtcagggtggtcaccagggtgggccagggcacgggcagcttgccggtggtgcagatgaacttcagggtcagcttgccgtaggtggcgtcgccctcgccctcgccgctcacgctgaacttgtggccgttcacgtcgccgtccagctccaccaggatgggcaccacgccggtgaacagctcctcgcccttgctcacggggccggggttctcctccacgtcgccggcctgcttcagcaggctgaagttggtggccaggatcctctcgcacagcctccagccggtcacgccgttgatggtcaccctgaacagcaggctgccgtcggggttgatcagcctctcgtcgatgatcttgttgccgttccacagggtgccggtcacggtgatcttcttgccgtcgaacacggcgatgccctcgtagggcctgccgaagtagtcgatcatgttgggggtcacgccgtcgatcaccagggtgccgtagtgcaggatcaccttgaagtggtggtcgtccacggggtacaccaccttgaaaatcttctcgatctggcccatctggtcgccgctcaggccctcgtaggggatgatcacgtggatgtcgatcttcaggccgttctcgccgctcagcacgatcctctggatgggggtcacgctcacgcccaggttctggaacaggctgctcacgccgccctgctccagcacctggtccaggttgtagccggcggtctgcctccagtcgcccacgaagtcctccagggtgaacacggcctcctcgaagctgcacttctcctccatgcactccctctccaggttgccctgcacgaactcctccagcttgccgctgttgtacctcttgggcctgttcaggatcttgttggcgttctcgtggtccaggaaaactgtggaaacagggagagaaaaaccacacaacatatttaaagattgatgaagacaactaactgtaatatgctgctttttgttcttctcttcactgaccta

SEQ ID NO: 1551 - DNA, 5866 bp, synthetic construct
  source 1..5866: mol_type = other DNA
tgtaacatcagagattttgagacacgggccagagctgcatcgcgcgtttcggtgatgacggtgaaaacctctgacacatgcagctcccggagacggtcacagcttgtctgtaagcggatgccgggagcagacaagcccgtcagggcgcgtcagcgggtgttggcgggtgtcggggctggcttaactatgcggcatcagagcagattgtactgagagtgcaccatatgcggtgtgaaataccgcacagatgcgtaaggagaaaataccgcatcaggcgccattcgccattcaggctgcgcaactgttgggaagggcgatcggtgcgggcctcttcgctattacgccagctggcgaaagggggatgtgctgcaaggcgattaagttgggtaacgccagggttttcccagtcacgacgttgtaaaacgacggccagagaattcttggccactccctctctgcgcgctcgctcgctcactgaggccgggcgaccaaaggtcgcccgacgcccgggctttgcccgggcggcctcagtgagcgagcgagcgcgcagagagggagtggccaactccatcactaggggttcctagatctactagttgcataatctaagtcaaatggaaagaaatataaaaagtaacattattacttcttgttttcttcagtatttaacaatccttttttttcttcccttgcccagttgaggacccccagggagatgctgcccagaagacagacacatctcaccatgaccaggaccaccccaccttcaacaagatcactcccaatcttgcagagtttgcattctctctctacagacagcttgcacaccagagcaactctactaacatcttcttctctccagtcagcatagcaacagcatttgcaatgctcagccttggcacaaaggcagacacacatgatgagatccttgagggcctcaacttcaatctcacagagatcccagaagcccagatccatgagggcttccaggagctgctgagaacactcaaccagcctgactctcagctccagctcacaacaggcaatgggctcttcctctctgagggcctcaagcttgtagacaagttcctggaggatgtcaagaagctctaccactctgaagccttcacagtcaactttggagacacagaggaagccaagaagcagatcaatgactatgtagagaaggggactcagggcaagatagtagaccttgtcaaggagctggacagagacacagtctttgcactggtcaactacatcttcttcaaggggaagtgggagagaccctttgaagtcaaggacacagaggaggaggacttccatgtagaccaggtgacaacagtcaaggttcccatgatgaagagacttggcatgttcaatatccagcactgcaagaagctcagctcttgggtcctcctcatgaagtaccttggcaatgcaacagcaatcttcttccttcctgatgagggcaagctccagcaccttgagaatgagctgacacatgacatcatcacaaagttcctggagaatgaggacagaaggtctgcatctctccaccttccaaagctcagcatcacaggcacctatgacctcaagtctgtccttggccagcttggcatcacaaaggtcttctctaatggtgcagacctctctggagtcacagaggaagcccccctcaagctcagcaaggctgtgcacaaggctgtgctcacaatagatgagaaggggacagaggctgcaggtgccatgttcctggaagccatccccatgagcatcccaccagaagtcaagttcaacaagccttttgtcttcctgatgatagagcagaacacaaagtctcccctcttcatgggcaaggtagtcaaccccactcaaaagtaacagacatgataagatacattgatgagtttggacaaaccacaactagaatgcagtgaaaaaaatgctttatttgtgaaatttgtgatgctattgctttatttgtaaccattataagctgcaataaacaagttaacaacaacaattgcattcattttatgtttcaggttcagggggaggtgtgggaggttttttggggataccccctagagccccagctggttcttttctcctcagaagccatagagcccatctcatccccagcatgcctgctattgtcttcccaatcctcccccttgctgtcctgccccaccccaccccccagaatagaatgacacctactcagacaattctatgcaatttcctcattttattaggaaaggacagtgggagtggcaccttccagggtcaaggaaggcatgggggaggggcaaacaacagatggctggcaactagaaggcacagtctaggttacttctgggtggggttcaccaccttgcccatgaacagggggctcttggtgttctgctctatcatcaggaacacaaaaggcttgttgaacttcacctctggggggatgctcatggggatggcctccaggaacatggctcctgctgcctctgtgcccttctcatctatggtcagcactgccttgtgcactgccttgctcagcttcaggggggcctcctctgtcactccagacaggtctgctccattgctgaacaccttggtgatgcccagctggcccagcacagacttcaggtcataggtgcctgtgatgctcagcttgggcaggtgcaggctggcagacctcctgtcctcattctccaggaacttggtgatgatgtcatgggtcagctcattctccaggtgctgcagcttgccctcatctggcaggaagaagatggctgtggcattgcccaggtacttcatcagcagcacccagctgctcagcttcttgcagtgctggatattgaacatgcccagcctcttcatcatgggcaccttcactgtggtcacctggtccacatggaagtcctcctcctctgtgtccttcacctcaaagggcctctcccacttgcccttgaagaagatgtagttcaccagggcaaacactgtgtccctgtccagctccttcaccaggtccactatcttgccctgggtgcccttctccacatagtcattgatctgcttcttggcctcctctgtgtctccaaagttcactgtgaaggcctcagagtggtacagcttcttcacatcctccaggaacttgtccaccagcttcaggccctcagacaggaacaggccattgcctgtggtcagctgcagctggctgtctggctggttcagggtcctcagcagctcctggaagccctcatggatctgggcctctgggatctctgtcaggttgaagttcaggccctccaggatctcatcatgggtgtctgccttggtgcccaggctcagcatggcaaaggctgtggctatgctcactgggctgaagaagatgttggtgctgttgctctggtgggccagctgcctgtacaggctgaaggcaaactctgccaggttgggggtgatcttgttgaaggtggggtggtcctggtcatggtggctggtgtctgtcttctgggctgcatctccctgggggtcctcaactgggcaagggaagaaaaaaaaggattgttaaatactgaagaaaacaagaagtaataatgttactttttatatttctttccatttgacttagattatgcaactagtagatctaggaacccctagtgatggagttggccactccctctctgcgcgctcgctcgctcactgaggccgcccgggcaaagcccgggcgtcgggcgacctttggtcgcccggcctcagtgagcgagcgagcgcgcagagagggagtggccaaacgcgtggtgtaatcatggtcatagctgtttcctgtgtgaaattgttatccgctcacaattccacacaacatacgagccggaagcataaagtgtaaagcctggggtgcctaatgagtgagctaactcacattaattgcgttgcgctcactgcccgctttccagtcgggaaacctgtcgtgccagctgcattaatgaatcggccaacgcgcggggagaggcggtttgcgtattgggcgctcttccgcttcctcgctcactgactcgctgcgctcggtcgttcggctgcggcgagcggtatcagctcactcaaaggcggtaatacggttatccacagaatcaggggataacgcaggaaagaacatgtgagcaaaaggccagcaaaaggccaggaaccgtaaaaaggccgcgttgctggcgtttttccataggctccgcccccctgacgagcatcacaaaaatcgacgctcaagtcagaggtggcgaaacccgacaggactataaagataccaggcgtttccccctggaagctccctcgtgcgctctcctgttccgaccctgccgcttaccggatacctgtccgcctttctcccttcgggaagcgtggcgctttctcatagctcacgctgtaggtatctcagttcggtgtaggtcgttcgctccaagctgggctgtgtgcacgaaccccccgttcagcccgaccgctgcgccttatccggtaactatcgtcttgagtccaacccggtaagacacgacttatcgccactggcagcagccactggtaacaggattagcagagcgaggtatgtaggcggtgctacagagttcttgaagtggtggcctaactacggctacactagaagaacagtatttggtatctgcgctctgctgaagccagttaccttcggaaaaagagttggtagctcttgatccggcaaacaaaccaccgctggtagcggtggtttttttgtttgcaagcagcagattacgcgcagaaaaaaaggatctcaagaagatcctttgatcttttctacggggtctgacgctcagtggaacgaaaactcacgttaagggattttggtcatgagattatcaaaaaggatcttcacctagatccttttaaattaaaaatgaagttttaaatcaagcccaatctgaataatgttacaaccaattaaccaattctgattagaaaaactcatcgagcatcaaatgaaactgcaatttattcatatcaggattatcaataccatatttttgaaaaagccgtttctgtaatgaaggagaaaactcaccgaggcagttccataggatggcaagatcctggtatcggtctgcgattccgactcgtccaacatcaatacaacctattaatttcccctcgtcaaaaataaggttatcaagtgagaaatcaccatgagtgacgactgaatccggtgagaatggcaaaagtttatgcatttctttccagacttgttcaacaggccagccattacgctcgtcatcaaaatcactcgcatcaaccaaaccgttattcattcgtgattgcgcctgagcgagacgaaatacgcgatcgctgttaaaaggacaattacaaacaggaatcgaatgcaaccggcgcaggaacactgccagcgcatcaacaatattttcacctgaatcaggatattcttctaatacctggaatgctgtttttccggggatcgcagtggtgagtaaccatgcatcatcaggagtacggataaaatgcttgatggtcggaagaggcataaattccgtcagccagtttagtctgaccatctcatctgtaacatcattggcaacgctacctttgccatgtttcagaaacaactctggcgcatcgggcttcccatacaagcgatagattgtcgcacctgattgcccgacattatcgcgagcccatttatacccatataaatcagcatccatgttggaatttaatcgcggcctcgacgtttcccgttgaatatggctcataacaccccttgtattactgtttatgtaagcagacagttttattgttcatgatgatatatttttatcttgtgcaa

SEQ ID NO: 1552 - DNA, 1182 bp, synthetic construct; identical to SEQ ID NO: 781
  source 1..1182: mol_type = other DNA

SEQ ID NO: 1553 - DNA, 1185 bp, synthetic construct; identical to SEQ ID NO: 771
  source 1..1185: mol_type = other DNA

SEQ ID NO: 1554 - DNA, 100 bp, synthetic construct
  source 1..100: mol_type = other DNA
tgcataatctaagtcaaatggaaagaaatataaaaagtaacattattacttcttgttttcttcagtatttaacaatccttttttttcttcccttgcccag

SEQ ID NO: 1555 - DNA, 100 bp, synthetic construct
  source 1..100: mol_type = other DNA
ctgggcaagggaagaaaaaaaaggattgttaaatactgaagaaaacaagaagtaataatgttactttttatatttctttccatttgacttagattatgca

SEQ ID NO: 1556 - DNA, 20 bp, synthetic construct
  source 1..20: mol_type = other DNA
actcacgatgaaatcctgga

SEQ ID NO: 1557 - DNA, 20 bp, synthetic construct
  source 1..20: mol_type = other DNA
actcatgatgaaatcctgga

SEQ ID NO: 1558 - DNA, 20 bp, synthetic construct
  source 1..20: mol_type = other DNA
acccatgatgagatcctgga

SEQ ID NO: 1559 - protein, 8 aa, synthetic construct
SANLHLPR

SEQ ID NO: 1560 - protein, 8 aa, Homo sapiens
SASLHLPK

SEQ ID NO: 1561 - protein, 8 aa, Homo sapiens
AVLTIDEK

SEQ ID NO: 1562 - RNA, 1831 nt, synthetic construct
  source 1..1831: mol_type = other RNA
gggaagctcagaataaacgctcaactttggccggatctggcgcgccaccatgaagtgggtaacctttatttcccttctttttctctttagctcggcttattccaggggtgtgtttcgtcgagatgcacttgaggatccccagggagatgctgcccagaagacagatacatcccaccatgatcaggatcacccaaccttcaacaagatcacccccaacctggctgagttcgccttcagcctataccgccagctggcacaccagtccaacagcaccaatatcttcttctccccagtgagcatcgctacagcctttgcaatgctctccctggggaccaaggctgacactcacgatgaaatcctggagggcctgaatttcaacctcacggagattccggaggctcagatccatgaaggcttccaggaactcctccgtaccctcaaccagccagacagccagctccagctgaccaccggcaatggcctgttcctcagcgagggcctgaagctagtggataagtttttggaggatgttaaaaagttgtaccactcagaagccttcactgtcaacttcggggacaccgaagaggccaagaaacagatcaacgattacgtggagaagggtactcaagggaaaattgtggatttggtcaaggagcttgacagagacacagtttttgctctggtgaattacatcttctttaaaggcaaatgggagagaccctttgaagtcaaggacaccgaggaagaggacttccacgtggaccaggtgaccaccgtgaaggtgcctatgatgaagcgtttaggcatgtttaacatccagcactgtaagaagctgtccagctgggtgctgctgatgaaatacctgggcaatgccaccgccatcttcttcctgcctgatgaggggaaactacagcacctggaaaatgaactcacccacgatatcatcaccaagttcctggaaaatgaagacagaaggtctgccagcttacatttacccaaactgtccattactggaacctatgatctgaagagcgtcctgggtcaactgggcatcactaaggtcttcagcaatggggctgacctctccggggtcacagaggaggcacccctgaagctctccaaggccgtgcataaggctgtgctgaccatcgacgagaaagggactgaagctgctggggccatgtttttagaggccatacccatgtctatcccccccgaggtcaagttcaacaaaccctttgtcttcttaatgattgaacaaaataccaagtctcccctcttcatgggaaaagtggtgaatcccacccaaaaataataggctagccaccagcctcaagaacacccgaatggagtctctaagctacataataccaacttacactttacaaaatgttgtcccccaaaatgtagccattcgtatctgctcctaataaaaagaaagtttcttcacattctctcgagaaaaaaaaaaaatggaaaaaaaaaaaacggaaaaaaaaaaaggtaaaaaaaaaaaatataaaaaaaaaaacataaaaaaaaaaaacgaaaaaaaaaaaacgtaaaaaaaaaaaactcaaaaaaaaaaagataaaaaaaaaaaacctaaaaaaaaaaaatgtaaaaaaaaaaaagggaaaaaaaaaaacgcaaaaaaaaaaaacacaaaaaaaaaaaatgcaaaaaaaaaaaatcgaaaaaaaaaaaatctaaaaaaaaaaaacgaaaaaaaaaaaacccaaaaaaaaaaaagacaaaaaaaaaaaatagaaaaaaaaaaagttaaaaaaaaaaaactgaaaaaaaaaaaatttaaaaaaaaaaaatctag

SEQ ID NO: 1563 - RNA, 1822 nt, synthetic construct
  source 1..1822: mol_type = other RNA
gggaagctcagaataaacgctcaactttggccggatctggcgcgccaccatgccgtcttctgtctcgtggggcatcctcctgctggcaggcctgtgctgcctggtccctgtctccctggctgaggatccccagggagatgctgcccagaagacagatacatcccaccatgatcaggatcacccaaccttcaacaagatcacccccaacctggctgagttcgccttcagcctataccgccagctggcacaccagtccaacagcaccaatatcttcttctccccagtgagcatcgctacagcctttgcaatgctctccctggggaccaaggctgacactcacgatgaaatcctggagggcctgaatttcaacctcacggagattccggaggctcagatccatgaaggcttccaggaactcctccgtaccctcaaccagccagacagccagctccagctgaccaccggcaatggcctgttcctcagcgagggcctgaagctagtggataagtttttggaggatgttaaaaagttgtaccactcagaagccttcactgtcaacttcggggacaccgaagaggccaagaaacagatcaacgattacgtggagaagggtactcaagggaaaattgtggatttggtcaaggagcttgacagagacacagtttttgctctggtgaattacatcttctttaaaggcaaatgggagagaccctttgaagtcaaggacaccgaggaagaggacttccacgtggaccaggtgaccaccgtgaaggtgcctatgatgaagcgtttaggcatgtttaacatccagcactgtaagaagctgtccagctgggtgctgctgatgaaatacctgggcaatgccaccgccatcttcttcctgcctgatgaggggaaactacagcacctggaaaatgaactcacccacgatatcatcaccaagttcctggaaaatgaagacagaaggtctgccagcttacatttacccaaactgtccattactggaacctatgatctgaagagcgtcctgggtcaactgggcatcactaaggtcttcagcaatggggctgacctctccggggtcacagaggaggcacccctgaagctctccaaggccgtgcataaggctgtgctgaccatcgacgagaaagggactgaagctgctggggccatgtttttagaggccatacccatgtctatcccccccgaggtcaagttcaacaaaccctttgtcttcttaatgattgaacaaaataccaagtctcccctcttcatgggaaaagtggtgaatcccacccaaaaataataggctagccaccagcctcaagaacacccgaatggagtctctaagctacataataccaacttacactttacaaaatgttgtcccccaaaatgtagccattcgtatctgctcctaataaaaagaaagtttcttcacattctctcgagaaaaaaaaaaaatggaaaaaaaaaaaacggaaaaaaaaaaaggtaaaaaaaaaaaatataaaaaaaaaaacataaaaaaaaaaaacgaaaaaaaaaaaacgtaaaaaaaaaaaactcaaaaaaaaaaagataaaaaaaaaaaacctaaaaaaaaaaaatgtaaaaaaaaaaaagggaaaaaaaaaaacgcaaaaaaaaaaaacacaaaaaaaaaaaatgcaaaaaaaaaaaatcgaaaaaaaaaaaatctaaaaaaaaaaaacgaaaaaaaaaaaacccaaaaaaaaaaaagacaaaaaaaaaaaatagaaaaaaaaaaagttaaaaaaaaaaaactgaaaaaaaaaaaatttaaaaaaaaaaaatctag

SEQ ID NO: 1564 - DNA, 5866 bp, synthetic construct; identical to SEQ ID NO: 1551
  source 1..5866: mol_type = other DNA

SEQ ID NO: 1565 - DNA, 1182 bp, synthetic construct; identical to SEQ ID NO: 781
  source 1..1182: mol_type = other DNA

SEQ ID NO: 1566 - DNA, 1185 bp, synthetic construct; identical to SEQ ID NO: 771
  source 1..1185: mol_type = other DNA

SEQ ID NO: 1567 - DNA, 20 bp, Homo sapiens
  source 1..20: mol_type = genomic DNA
actcacgatgaaatcctgga

SEQ ID NO: 1568 - DNA, 20 bp, synthetic construct
  source 1..20: mol_type = other DNA
actcatgatgaaatcctgga

SEQ ID NO: 1569 - DNA, 20 bp, synthetic construct
  source 1..20: mol_type = other DNA
acccatgatgagatcctgga

1.-97. (canceled)

98. A bidirectional nucleic acid construct comprising:
a) a first segment comprising a first alpha-1 antitrypsin (AAT) polypeptide coding sequence comprising the nucleic acid sequence of SEQ ID NO: 781; and
b) a second segment comprising a reverse complement of a second AAT polypeptide coding sequence comprising the nucleic acid sequence of SEQ ID NO: 782;
wherein the construct does not comprise a promoter that drives the expression of either the first AAT polypeptide coding sequence or the second AAT polypeptide coding sequence.

99. The bidirectional nucleic acid construct of claim 98, wherein the second segment is 3′ of the first segment.

100. The bidirectional nucleic acid construct of claim 98, wherein the construct does not comprise a homology arm.

101. The bidirectional nucleic acid construct of claim 98, wherein the first segment is linked to the second segment by a linker.

102. The bidirectional nucleic acid construct of claim 98, wherein each of the first and second segments comprises a polyadenylation tail sequence, a polyadenylation signal sequence, or a polyadenylation site.

103. The bidirectional nucleic acid construct of claim 98, wherein the construct comprises a splice acceptor site.

104. The bidirectional nucleic acid construct of claim 103, wherein the construct comprises a first splice acceptor site upstream of the first segment and a second (reverse) splice acceptor site downstream of the second segment.

105. The bidirectional nucleic acid construct of claim 98, wherein the construct is single-stranded.

106. The bidirectional nucleic acid construct of claim 98, wherein the construct comprises one or more of the following terminal structures: hairpin, loops, inverted terminal repeats (ITR), or toroid.

107. The bidirectional nucleic acid construct of claim 98, wherein the construct comprises one, two, or three inverted terminal repeats (ITR).

108. A method of treating alpha-1 antitrypsin deficiency (AATD) in a subject, the method comprising administering the bidirectional nucleic acid construct of claim 98.

109. The method of claim 108, comprising administering the bidirectional nucleic acid in combination with:
i) an RNA-guided DNA binding agent; and
ii) an albumin guide RNA (gRNA) comprising a sequence selected from:
a) a sequence that is at least 95% identical to a sequence selected from the group consisting of SEQ ID Nos: 2-33;
b) at least 17, 18, 19, or 20 contiguous nucleotides of a sequence selected from the group consisting of SEQ ID NOs: 2-33; and
c) a sequence selected from the group consisting of SEQ ID NOs: 2-33.

110. The method of claim 109, wherein the bidirectional nucleic acid is administered in combination with an endogenous SERPINA1 gene targeted nucleic acid agent that reduces expression of the endogenous SERPINA1 gene without significantly reducing expression of the AAT polypeptide coding sequences of the bidirectional nucleic acid construct.

111. The method of claim 108, wherein the bidirectional nucleic acid construct is administered in a nucleic acid vector or a lipid nanoparticle.

112. The method of claim 109, wherein
i) the RNA-guided DNA binding agent or the albumin gRNA is administered in a nucleic acid vector or lipid nanoparticle; and/or
ii) the RNA-guided DNA binding agent or the SERPINA1 gRNA is administered in a nucleic acid vector or lipid nanoparticle.

113. A vector comprising the bidirectional nucleic acid construct of claim 98.

114. The vector of claim 113, wherein the vector is an adeno-associated virus (AAV) vector.

115. A lipid nanoparticle comprising the bidirectional nucleic acid construct of claim 98.

116. A host cell comprising the bidirectional nucleic acid construct of claim 98.

117. The host cell of claim 116, wherein the cell expresses the AAT polypeptide encoded by the bidirectional nucleic acid construct.
